(19) United States
(12) Patent Application Publication
(10) Pub. No.: US 2020/0224216 A1
(43) Pub. Date: Jul. 16, 2020

(54) INSECTICIDAL PROTEINS AND METHODS FOR THEIR USE

(71) Applicant: PIONEER HI-BRED INTERNATIONAL, INC., JOHNSTON, IA (US)

(72) Inventors: NURIA JIMENEZ-JUAREZ, WEST DES MOINES, IA (US); ALBERT L LU, WEST DES MOINES, IA (US); LU LIU, PALO ALTO, CA (US); MARK EDWARD NELSON, WAUKEE, IA (US); GUSUI WU, FOSTER CITY, CA (US)

(73) Assignee: PIONEER HI-BRED INTERNATIONAL, INC., JOHNSTON, IA (US)

(21) Appl. No.: 16/479,050

(22) PCT Filed: Jan. 11, 2018
(86) PCT No.: PCT/US18/13253

§ 371 Date: Jul. 18, 2019

Related U.S. Application Data
(60) Provisional application No. 62/452,627, filed on Jan. 31, 2017.

(51) Int. Cl. C12N 15/82; C07K 14/415

(52) U.S. Cl. CPC C12N 15/8286; A01H 6/4684; C07K 14/415

(57) ABSTRACT

Compositions and methods for controlling pests are provided. The methods involve transforming organisms with a nucleic acid sequence encoding an insecticidal protein. In particular, the nucleic acid sequences are useful for preparing plants and microorganisms that possess insecticidal activity. Thus, transformed bacteria, plants, plant cells, plant tissues and seeds are provided. Compositions are insecticidal nucleic acids and proteins of bacterial species. The sequences find use in the construction of expression vectors for subsequent transformation into organisms of interest including plants, as probes for the isolation of other homologous (or partially homologous) genes. The pesticidal proteins find use in controlling, inhibiting growth or killing Lepidopteran, Coleopteran, Dipteran, fungal, Hemipteran and nematode pest populations and for producing compositions with insecticidal activity.

### CROSS-REFERENCE TO RELATED APPLICATIONS

[0001] This application claims the benefit of International Application No. PCT/US2018/013253, filed on Jan. 11, 2018, which claims the benefit of U.S. Provisional Application No. 62/452,627, filed Jan. 31, 2017, each of which is hereby incorporated herein in its entirety by reference.

### REFERENCE TO SEQUENCE LISTING SUBMITTED ELECTRONICALLY

[0002] The official copy of the sequence listing is submitted electronically via EFS-Web as an ASCII formatted sequence listing with a file named “7417WOPCT_SequenceListing.txt” created on Jan. 18, 2017, and having a size of 4,505 kilobytes and is filed concurrently with the specification. The sequence listing contained in this ASCII formatted document is part of the specification and is herein incorporated by reference in its entirety.

### FIELD

[0003] This disclosure relates to the field of molecular biology. Provided are novel genes that encode pesticidal proteins. These pesticidal proteins and the nuchcleic acid sequences that encode them are useful in preparing pesticidal formulations and in the production of transgenic pest-resistant plants.

### BACKGROUND

[0004] Biological control of insect pests of agricultural significance using a microbial agent, such as fungi, bacteria or another species of insect affords an environmentally friendly and commercially attractive alternative to synthetic chemical pesticides. Generally speaking, the use of biopesticides presents a lower risk of pollution and environmental hazards and biopesticides provide greater target specificity than is characteristic of traditional broad-spectrum chemical insecticides. In addition, biopesticides often cost less to produce and thus improve economic yield for a wide variety of crops.

[0005] Certain species of microorganisms of the genus Bacillus are known to possess pesticidal activity against a range of insect pests including Lepidoptera, Diptera, Coleoptera, Hemiptera and others. Bacillus thuringiensis (Bt) and Bacillus popilliae are among the most successful biocontrol agents discovered to date. Insect pathogenicity has also been attributed to strains of B. larvae, B. lentimorbus, B. sphaericus and B. cereus. Microbial insecticides, particularly those obtained from Bacillus strains, have played an important role in agriculture as alternatives to chemical pest control.

[0006] Crop plants have been developed with enhanced insect resistance by genetically engineering crop plants to produce pesticidal proteins from Bacillus. For example, corn and cotton plants have been genetically engineered to produce pesticidal proteins isolated from strains of Bt. These genetically engineered crops are now widely used in agriculture and have provided the farmer with an environmentally friendly alternative to traditional insect-control methods. While they have proven to be very successful commercially, these genetically engineered, insect-resistant crop plants provide resistance to only a narrow range of the economically important insect pests. In some cases, insects can develop resistance to different insecticidal compounds, which raises the need to identify alternative biological control agents for pest control.

[0007] Accordingly, there remains a need for new pesticidal proteins with different ranges of insecticidal activity against insect pests, e.g., insecticidal proteins which are active against a variety of insects in the order Lepidoptera and/or the order Coleoptera including but not limited to insect pests that have developed resistance to existing insecticides.

### SUMMARY

[0008] Compositions and methods for conferring pesticidal activity to bacteria, plants, plant cells, tissues and seeds are provided. Compositions include nucleic acid molecules encoding sequences for pesticidal and insecticidal polypeptides, vectors comprising those nucleic acid molecules, and host cells comprising the vectors. Compositions also include the pesticidal polypeptide sequences and antibodies to those polypeptides. The nucleic acid sequences can be used in DNA constructs or expression cassettes for transformation and expression in organisms, including microorganisms and plants. The nucleotide or amino acid sequences may be synthetic sequences that have been designed for expression in an organism including, but not limited to, a microorganism or a plant. Compositions also comprise transformed bacteria, plants, plant cells, tissues and seeds.

[0009] In particular, isolated or recombinant nucleic acid molecules are provided encoding Pteridophyta Insecticidal Protein-83 (PtIP-83) polypeptides including amino acid substitutions, deletions, insertions, fragments thereof. Additionally, amino acid sequences corresponding to the PtIP-83 polypeptides are encompassed. Provided are isolated or recombinant nucleic acid molecules capable of encoding PtIP-83 polypeptides of SEQ ID NO: 1, SEQ ID NO: 3, SEQ ID NO: 5, SEQ ID NO: 7, SEQ ID NO: 9, SEQ ID NO: 11, SEQ ID NO: 13, SEQ ID NO: 15, SEQ ID NO: 17, SEQ ID NO: 19, SEQ ID NO: 21, SEQ ID NO: 23, SEQ ID NO: 716, SEQ ID NO: 754, SEQ ID NO: 755, SEQ ID NO: 756, SEQ ID NO: 757, SEQ ID NO: 758, SEQ ID NO: 759, SEQ ID NO: 760, SEQ ID NO: 761, SEQ ID NO: 762, SEQ ID NO: 763, SEQ ID NO: 764, SEQ ID NO: 765, SEQ ID NO: 766, SEQ ID NO: 767, SEQ ID NO: 768, SEQ ID NO: 769, and SEQ ID NOs: 958-1026, as well as amino acid substitutions, deletions, insertions, fragments thereof, and combinations thereof. Nucleic acid sequences that are complementary to a nucleic acid sequence of the embodiments or that hybridize to a sequence of the embodiments are also encompassed. Also provided are isolated or recombinant PtIP-83 polypeptides of SEQ ID NO: 1, SEQ ID NO: 3, SEQ ID NO: 5, SEQ ID NO: 7, SEQ ID NO: 9, SEQ ID NO: 11, SEQ ID NO:

[0010] 13, SEQ ID NO: 15, SEQ ID NO: 17, SEQ ID NO: 19, SEQ ID NO: 21, SEQ ID NO: 23, SEQ ID NO: 716, SEQ ID NO: 754, SEQ ID NO: 755, SEQ ID NO: 756, SEQ ID NO: 757, SEQ ID NO: 758, SEQ ID NO: 759, SEQ ID NO: 760, SEQ ID NO: 761, SEQ ID NO: 762, SEQ ID NO: 763, SEQ ID NO: 764, SEQ ID NO: 765, SEQ ID NO: 766, SEQ ID NO: 767, SEQ ID NO: 768, SEQ ID NO: 769, and SEQ ID NOs: 958-1026, as well as amino acid substitutions, deletions, insertions, fragments thereof and combinations thereof.

[0011] Methods are provided for producing the polypeptides and for using those polypeptides for controlling or killing a Lepidopteran, Coleopteran, nematode, fungi, and/or Dipteran pests. The transgenic plants of the embodiments express one or more of the pesticidal sequences disclosed herein. In various embodiments, the transgenic plant further comprises one or more additional genes for insect resistance, for example, one or more additional genes for controlling Coleopteran, Lepidopteran, Hemipteran or nematode pests. It will be understood by one of skill in the art that the transgenic plant may comprise any gene imparting an agronomic trait of interest.

[0012] Methods for detecting the nucleic acids and polypeptides of the embodiments in a sample are also included. A kit for detecting the presence of a PtIP-83 polypeptide or detecting the presence of a polynucleotide encoding a PtIP-83 polypeptide in a sample is provided. The kit may be provided along with all reagents and control samples necessary for carrying out a method for detecting the intended agent, as well as instructions for use.

[0013] Compositions and methods for addressing insect resistance management are also contemplated by the disclosure. In one embodiment, compositions are contemplated that comprise polynucleotide sequences encoding PtIP-83Aa (SEQ ID NO: 1) and PtIP-83Cb (SEQ ID NO: 7) or PtIP-83Gb (SEQ ID NO: 798) polypeptides disclosed herein. In another embodiment, methods are contemplated for minimizing the development of insect resistance comprising utilizing compositions, including transgenic plants, comprising polynucleotide sequences encoding PtIP-83Aa (SEQ ID NO: 1) and PtIP-83Cb (SEQ ID NO: 7) or PtIP-83Gb (SEQ ID NO: 798) polypeptides disclosed herein.

[0014] The compositions and methods of the embodiments are useful for the production of organisms with enhanced pest resistance or tolerance. These organisms and compositions comprising the organisms are desirable for agricultural purposes. The compositions of the embodiments are also useful for generating altered or improved proteins that have pesticidal activity or for detecting the presence of PtIP-83 polypeptides.

### BRIEF DESCRIPTION OF THE FIGURES

[0015] FIG. 1 the phylogeny of ferns based on the classification for extant ferns by A. R. Smith et al, TAXON, 55:705-731 (2006).

[0016] FIG. 2a-2j shows an alignment of the amino acid sequences of PtIP-83Aa (SEQ ID NO: 1), PtIP-83Ca (SEQ ID NO: 5), PtIP-83Cb (SEQ ID NO: 7), PtIP-83Cc (SEQ ID NO: 9), PtIP-83Cd (SEQ ID NO: 11), PtIP-83Ce (SEQ ID NO: 13), PtIP-83Cf (SEQ ID NO: 15), and PtIP-83Fa (SEQ ID NO: 3); an alignment of the secondary structure prediction, by the PSIPRED, top ranked secondary structure prediction method, for PtIP-83Aa (SEQ ID NO: 1) and PtIP-83Fa (SEQ ID NO: 3); and the locations of the amino acid sequence MOTIFs, as predicted by MEME motif analysis, relative to PtIP-83Aa (SEQ ID NO: 1). A “H” indicates a predicted helical structure, an “E” indicates a PtIP-beta strand structure, and a “C” indicates a predicted coil structure.

[0017] FIG. 3a-3b shows a sequence alignment between PtIP-83Aa (SEQ ID NO: 1) and PtIP-50Aa (SEQ ID NO: 34). The crossover points in the PtIP-83 Aa/PtIP-50Aa chimeras indicated in Table 13 are indicated by an arrow (↓) above the amino acid.

[0018] FIG. 4a-4d shows an amino acid sequence alignment of PtIP-83Aa (SEQ ID NO: 1), PtIP-83Fa (SEQ ID NO: 3), PtIP-50Aa (SEQ ID NO: 34), PtIP-50Ba (SEQ ID NO: 35), and PtIP-50Bb (SEQ ID NO: 36). The conserved sequence motifs identified are indicated and the amino acid sequence of the motifs in PtIP-83Aa (SEQ ID NO: 1) are underlined.

[0019] FIG. 5a-5e shows an amino acid sequence alignment of PtIP-83Aa (SEQ ID NO: 1), PtIP-83Ca (SEQ ID NO: 5), PtIP-83Cb (SEQ ID NO: 7), PtIP-83Cc (SEQ ID NO: 9), PtIP-83Cd (SEQ ID NO: 11), PtIP-83Ce (SEQ ID NO: 13), PtIP-83Cf (SEQ ID NO: 15), PtIP-83Cg (SEQ ID NO: 17), and PtIP-83Da (SEQ ID NO: 19). The sequence diversity is highlighted.

[0020] FIG. 6 shows an assessment of specific binding, binding, affinity and competition between PtIP-83Aa and PtIP-83Cb on CEW BBMVs. (A) Gel images show concentration dependent homologous competition between Alexa-labeled and unlabeled PtIP-83Aa or PtIP-83Cb. (B) Apparent binding affinity reported as EC50 determined from fitting the relationship of the signal from Alexa-labeled PtIP-83Aa or PtIP-83Cb vs. concentrations of their unlabeled counterparts. The Alexa-florescence signals were determined by densitometry performed on gel images as represented in (A). (C) Heterologous competition between Alexa-PtIP-83Aa and unlabeled PtIP-83Cb. Each bar reflects the specific binding measured under each condition. (D) Heterologous competition between Alexa-PtIP-83Cb and unlabeled PtIP-83Aa determined as describe in (C).

### DETAILED DESCRIPTION

[0021] It is to be understood that this disclosure is not limited to the particular methodology, protocols, cell lines, genera, and reagents described, as such may vary. It is also to be understood that the terminology used herein is for the purpose of describing particular embodiments only, and is not intended to limit the scope of the present disclosure.

[0022] As used herein the singular forms “a”, “and”, and “the” include plural referents unless the context clearly dictates otherwise. Thus, for example, reference to “a cell” includes a plurality of such cells and reference to “the protein” includes reference to one or more proteins and equivalents thereof known to those skilled in the art, and so forth. All technical and scientific terms used herein have the same meaning as commonly understood to one of ordinary skill in the art to which this disclosure belongs unless clearly indicated otherwise.

[0023] The present disclosure is drawn to compositions and methods for controlling pests. The methods involve transforming organisms with nucleic acid sequences encoding PtIP-83 polypeptides. In particular, the nucleic acid sequences of the embodiments are useful for preparing plants and microorganisms that possess pesticidal activity. Thus, transformed bacteria, plants, plant cells, plant tissues and seeds are provided. The compositions are pesticidal nucleic acids and proteins of bacterial species. The nucleic acid sequences find use in the construction of expression vectors for subsequent transformation into organisms of interest, as probes for the isolation of other homologous (or partially homologous) genes, and for the generation of altered PtIP-83 polypeptides by methods known in the art, such as site directed mutagenesis, domain swapping or DNA shuffling. The PtIP-83 find use in controlling or killing Lepidopteran, Coleopteran, Dipteran, fungal, Hemipteran and nematode pest populations and for producing compositions with pesticidal activity. Insect pests of interest include, but are not limited to, Lepidoptera species including but not limited to: Corn Earworm, (CEW) (Helicoverpa zea Boddie), European Corn Borer (ECB) (Ostrinia nubilalis Hübner), diamond-back moth (DBM) (Plutella xylostella Linnaeus), e.g., Helicoverpa zea Boddie; soybean looper (SBL) Chrysodeixis includens Walker; and velvet bean caterpillar (VBC) (Anticarsia gemmatalis Hübner) and Coleoptera species including but not limited to Western corn rootworm (Diabrotica virgifera)—WCRW, Southern corn rootworm (Diabrotica undecimpunctata howardi)—SCRW, and Northern corn rootworm (Diabrotica barberi)—NCRW.

[0024] By “pesticidal toxin” or “pesticidal protein” is used herein to refer to a toxin that has toxic activity against one or more pests, including, but not limited to, members of the Lepidoptera, Diptera, Hemiptera and Coleoptera orders or the Nematoda phylum or a protein that has homology to such a protein. Pesticidal proteins have been purified from organisms including, for example, Bacillus sp., Pseudomonas sp., Photorhabdus sp., Xenorhabdus sp., Clostridium bifermentans and Paenibacillus popilliae.

[0025] In some embodiments the PtIP-83 polypeptide include amino acid sequences deduced from the full-length nucleic acid sequences disclosed herein and amino acid sequences that are shorter than the full-length sequences, either due to the use of an alternate downstream start site or due to processing that produces a shorter protein having pesticidal activity. Processing may occur in the organism the protein is expressed in or in the pest after ingestion of the protein.

[0026] Thus, provided herein are novel isolated or recombinant nucleic acid sequences that confer pesticidal activity. Also provided are the amino acid sequences of PtIP-83 polypeptides. The protein resulting from translation of these PtIP-83 polypeptide genes allows cells to control or kill pests that ingest it.

### Nucleic Acid Molecules, and Variants and Fragments Thereof

[0027] One aspect pertains to isolated or recombinant nucleic acid molecules comprising nucleic acid sequences encoding PtIP-83 polypeptides or biologically active portions thereof, as well as nucleic acid molecules sufficient for use as hybridization probes to identify nucleic acid molecules encoding proteins with regions of sequence homology. As used herein, the term “nucleic acid molecule” refers to DNA molecules (e.g., recombinant DNA, cDNA, genomic DNA, plastid DNA, mitochondrial DNA) and RNA molecules (e.g., mRNA) and analogs of the DNA or RNA generated using nucleotide analogs. The nucleic acid molecule can be single-stranded or double-stranded, but preferably is double-stranded DNA.

[0028] An “isolated” nucleic acid molecule (or DNA) is used herein to refer to a nucleic acid sequence (or DNA) that is no longer in its natural environment, for example in vitro. A “recombinant” nucleic acid molecule (or DNA) is used herein to refer to a nucleic acid sequence (or DNA) that is in a recombinant bacterial or plant host cell. In some embodiments, an “isolated” or “recombinant” nucleic acid is free of sequences (preferably protein encoding sequences) that naturally flank the nucleic acid (i.e., sequences located at the 5′ and 3′ ends of the nucleic acid) in the genomic DNA of the organism from which the nucleic acid is derived. For purposes of the disclosure, “isolated” or “recombinant” when used to refer to nucleic acid molecules excludes isolated chromosomes. For example, in various embodiments, the recombinant nucleic acid molecule encoding PtIP-83 polypeptides can contain less than about 5 kb, 4 kb, 3 kb, 2 kb, 1 kb, 0.5 kb or 0.1 kb of nucleic acid sequences that naturally flank the nucleic acid molecule in genomic DNA of the cell from which the nucleic acid is derived.

[0029] In some embodiments an isolated nucleic acid molecule encoding PtIP-83 polypeptides has one or more change in the nucleic acid sequence compared to the native or genomic nucleic acid sequence. In some embodiments the change in the native or genomic nucleic acid sequence includes but is not limited to: changes in the nucleic acid sequence due to the degeneracy of the genetic code; changes in the nucleic acid sequence due to the amino acid substitution, insertion, deletion and/or addition compared to the native or genomic sequence; removal of one or more intron; deletion of one or more upstream or downstream regulatory regions; and deletion of the 5′ and/or 3′ untranslated region associated with the genomic nucleic acid sequence. In some embodiments the nucleic acid molecule encoding a PtIP-83 polypeptide is a non-genomic sequence.

[0030] A variety of polynucleotides that encode PtIP-83 polypeptides or related proteins are contemplated. Such polynucleotides are useful for production of PtIP-83 polypeptides in host cells when operably linked to suitable promoter, transcription termination and/or polyadenylation sequences. Such polynucleotides are also useful as probes for isolating homologous or substantially homologous polynucleotides that encode PtIP-83 polypeptides or related proteins.

### Polynucleotides Encoding PtIP-83 Polypeptides

[0031] One source of polynucleotides that encode PtIP-83 polypeptides or related proteins is a fern or other primitive plant species which contains a PtIP-83 polynucleotide of SEQ ID NO: 2, SEQ ID NO: 4, SEQ ID NO: 6, SEQ ID NO: 8, SEQ ID NO: 10, SEQ ID NO: 12, SEQ ID NO: 14, SEQ ID NO: 16, SEQ ID NO: 18, SEQ ID NO: 20, SEQ ID NO: 22, SEQ ID NO: 24, SEQ ID NO: 717, SEQ ID NO: 738, SEQ ID NO: 739, SEQ ID NO: 740, SEQ ID NO: 741, SEQ ID NO: 742, SEQ ID NO: 743, SEQ ID NO: 744, SEQ ID NO: 745, SEQ ID NO: 746, SEQ ID NO: 747, SEQ ID NO: 748, SEQ ID NO: 749, SEQ ID NO: 750, SEQ ID NO: 751, SEQ ID NO: 752 or SEQ ID NO: 753, encoding a PtIP-83 polypeptide of SEQ ID NO: 1, SEQ ID NO: 3, SEQ ID NO: 5, SEQ ID NO: 7, SEQ ID NO: 9, SEQ ID NO: 11, SEQ ID NO: 13, SEQ ID NO: 15, SEQ ID NO: 17, SEQ ID NO: 19, SEQ ID NO: 21, SEQ ID NO: 23, SEQ ID NO: 716, SEQ ID NO: 754, SEQ ID NO: 755, SEQ ID NO: 756, SEQ ID NO: 757, SEQ ID NO: 758, SEQ ID NO: 759, SEQ ID NO: 760, SEQ ID NO: 761, SEQ ID NO: 762, SEQ ID NO: 763, SEQ ID NO: 764, SEQ ID NO: 765, SEQ ID NO: 766, SEQ ID NO: 767, SEQ ID NO: 768, SEQ ID NO: 769 or SEQ ID NOs: 889-957,. The polynucleotides of SEQ ID NO: 2, SEQ ID NO: 4, SEQ ID NO: 6, SEQ ID NO: 8, SEQ ID NO: 10, SEQ ID NO: 12, SEQ ID NO: 14, SEQ ID NO: 16, SEQ ID NO: 18, SEQ ID NO: 20, SEQ ID NO: 22, SEQ ID NO: 24, SEQ ID NO: 717, SEQ ID NO: 738, SEQ ID NO: 739, SEQ ID NO: 740, SEQ ID NO: 741, SEQ ID NO: 742, SEQ ID NO: 743, SEQ ID NO: 744, SEQ ID NO: 745, SEQ ID NO: 746, SEQ ID NO: 747, SEQ ID NO: 748, SEQ ID NO: 749, SEQ ID NO: 750, SEQ ID NO: 751, SEQ ID NO: 752 and SEQ ID NO: 753 can be used to express PtIP-83 polypeptides in bacterial hosts that include but are not limited to Agrobacterium, Bacillus, Escherichia, Salmonella, Pseudomonas and Rhizobium bacterial host cells. The polynucleotides are also useful as probes for isolating homologous or substantially homologous polynucleotides that encode PtIP-83 polypeptides or related proteins. Such probes can be used to identify homologous or substantially homologous polynucleotides derived from Pteridophyta species.

[0032] Polynucleotides that encode PtIP-83 polypeptides can also be synthesized de novo from a PtIP-83 polypeptide sequence. The sequence of the polynucleotide gene can be deduced from a PtIP-83 polypeptide sequence through use of the genetic code. Computer programs such as “BackTranslate” (GCG™ Package, Acclerys, Inc. San Diego, Calif.) can be used to convert a peptide sequence to the corresponding nucleotide sequence encoding the peptide. Examples of PtIP-83 polypeptide sequences that can be used to obtain corresponding nucleotide encoding sequences include, but are not limited to the PtIP-83 polypeptides of SEQ ID NO: 1, SEQ ID NO: 3, SEQ ID NO: 5, SEQ ID NO: 7, SEQ ID NO: 9, SEQ ID NO: 11, SEQ ID NO: 13, SEQ ID NO: 15, SEQ ID NO: 17, SEQ ID NO: 19, SEQ ID NO: 21, SEQ ID NO: 23, SEQ ID NO: 716, SEQ ID NO: 754, SEQ ID NO: 755, SEQ ID NO: 756, SEQ ID NO: 757, SEQ ID NO: 758, SEQ ID NO: 759, SEQ ID NO: 760, SEQ ID NO: 761, SEQ ID NO: 762, SEQ ID NO: 763, SEQ ID NO: 764, SEQ ID NO: 765, SEQ ID NO: 766, SEQ ID NO: 767, SEQ ID NO: 768, SEQ ID NO: 769 and SEQ ID NOs: 958-1026. Furthermore, synthetic PtIP-83 polynucleotide sequences of the disclosure can be designed so that they will be expressed in plants. Methods are available in the art for synthesizing plant-preferred genes. See, for example, Murray, et al., (1989) Nucleic Acids Res. 17:477-498, and Liu H et al. Mol Bio Rep 37:677-684, 2010, herein incorporated by reference. A Zea maize usage table can be also found at kazusa.or.jp//cgi-bin/show.cgi?species=4577, which can be accessed using the www prefix.

[0033] In some embodiments the nucleic acid molecule encoding a PtIP-83 polypeptide is a polynucleotide having the sequence set forth in SEQ ID NO: 2, SEQ ID NO: 4, SEQ ID NO: 6, SEQ ID NO: 8, SEQ ID NO: 10, SEQ ID NO: 12, SEQ ID NO: 14, SEQ ID NO: 16, SEQ ID NO: 18, SEQ ID NO: 20, SEQ ID NO: 22, SEQ ID NO: 24, SEQ ID NO: 717, SEQ ID NO: 738, SEQ ID NO: 739, SEQ ID NO: 740, SEQ ID NO: 741, SEQ ID NO: 742, SEQ ID NO: 743, SEQ ID NO: 744, SEQ ID NO: 745, SEQ ID NO: 746, SEQ ID NO: 747, SEQ ID NO: 748, SEQ ID NO: 749, SEQ ID NO: 750, SEQ ID NO: 751, SEQ ID NO: 752, SEQ ID NO: 753, and SEQ ID NOs: 889-957, and variants, fragments and complements thereof. “Complement” is used herein to refer to a nucleic acid sequence that is sufficiently complementary to a given nucleic acid sequence such that it can hybridize to the given nucleic acid sequence to thereby form a stable duplex. “Polynucleotide sequence variants” is used herein to refer to a nucleic acid sequence that except for the degeneracy of the genetic code encodes the same polypeptide.

[0034] In some embodiments the nucleic acid molecule encoding the PtIP-83 polypeptide is a non-genomic nucleic acid sequence. As used herein a “non-genomic nucleic acid sequence” or “non-genomic nucleic acid molecule” or “non-genomic polynucleotide” refers to a nucleic acid molecule that has one or more change in the nucleic acid sequence compared to a native or genomic nucleic acid sequence. In some embodiments the change to a native or genomic nucleic acid molecule includes but is not limited to: changes in the nucleic acid sequence due to the degeneracy of the genetic code; codon optimization of the nucleic acid sequence for expression in plants; changes in the nucleic acid sequence to introduce at least one amino acid substitution, insertion, deletion and/or addition compared to the native or genomic sequence; removal of one or more intron associated with the genomic nucleic acid sequence; insertion of one or more heterologous introns; deletion of one or more upstream or downstream regulatory regions associated with the genomic nucleic acid sequence; insertion of one or more heterologous upstream or downstream regulatory regions; deletion of the 5′ and/or 3′ untranslated region associated with the genomic nucleic acid sequence; insertion of a heterologous 5′ and/or 3′ untranslated region; and modification of a polyadenylation site. In some embodiments the non-genomic nucleic acid molecule is a cDNA. In some embodiments the non-genomic nucleic acid molecule is a synthetic nucleic acid sequence.

[0035] In some embodiments the nucleic acid molecule encoding a PtIP-83 polypeptide is a the non-genomic polynucleotide having a nucleotide sequence having at least 50%, 51%, 52%, 53%, 54%, 55%, 56%, 57%, 58%, 59%, 60%, 61%, 62%, 63%, 64%, 65%, 66%, 67%, 68%, 69%, 70%, 71%, 72%, 73%, 74%, 75%, 76%, 77%, 78%, 79%, 80%, 81%, 82%, 83%, 84%, 85%, 86%, 87%, 88%, 89%, 90%, 91%, 92%, 93%, 94%, 95%, 96%, 97%, 98% or 99% identity, to the nucleic acid sequence of SEQ ID NO: 2, SEQ ID NO: 4, SEQ ID NO: 6, SEQ ID NO: 8, SEQ ID NO: 10, SEQ ID NO: 12, SEQ ID NO: 14, SEQ ID NO: 16, SEQ ID NO: 18, SEQ ID NO: 20, SEQ ID NO: 22, SEQ ID NO: 24, SEQ ID NO: 717, SEQ ID NO: 738, SEQ ID NO: 739, SEQ ID NO: 740, SEQ ID NO: 741, SEQ ID NO: 742, SEQ ID NO: 743, SEQ ID NO: 744, SEQ ID NO: 745, SEQ ID NO: 746, SEQ ID NO: 747, SEQ ID NO: 748, SEQ ID NO: 749, SEQ ID NO: 750, SEQ ID NO: 751, SEQ ID NO: 752, SEQ ID NO: 753, or SEQ ID NOs: 889-957, wherein the PtIP-83 polypeptide has insecticidal activity.

[0036] In some embodiments the non-genomic polynucleotide is not the nucleic acid sequence of SEQ ID NO: 2, SEQ ID NO: 4, SEQ ID NO: 6, SEQ ID NO: 8, SEQ ID NO: 10, SEQ ID NO: 12, SEQ ID NO: 14, SEQ ID NO: 16, SEQ ID NO: 18, SEQ ID NO: 20, SEQ ID NO: 22, SEQ ID NO: 24, SEQ ID NO: 717, SEQ ID NO: 738, SEQ ID NO: 739, SEQ ID NO: 740, SEQ ID NO: 741, SEQ ID NO: 742, SEQ ID NO: 743, SEQ ID NO: 744, SEQ ID NO: 745, SEQ ID NO: 746, SEQ ID NO: 747, SEQ ID NO: 748, SEQ ID NO: 749, SEQ ID NO: 750, SEQ ID NO: 751, SEQ ID NO: 752, SEQ ID NO: 753 or SEQ ID NOs: 889-957.

[0037] In some embodiments the nucleic acid molecule encodes a PtIP-83 polypeptide comprising an amino acid sequence having at least 40%, 45%, 50%, 51%, 52%, 53%, 54%, 55%, 56%, 57%, 58%, 59%, 60%, 61%, 62%, 63%, 64%, 65%, 66%, 67%, 68%, 69%, 70%, 71%, 72%, 73%, 74%, 75%, 76%, 77%, 78%, 79%, 80%, 81%, 82%, 83%, 84%, 85%, 86%, 87%, 88%, 89%, 90%, 91%, 92%, 93%, 94%, 95%, 96%, 97%, 98% or 99% identity to the amino acid sequence of SEQ ID NO: 1, SEQ ID NO: 3, SEQ ID NO: 5, SEQ ID NO: 7, SEQ ID NO: 9, SEQ ID NO: 11, SEQ ID NO: 13, SEQ ID NO: 15, SEQ ID NO: 17, SEQ ID NO: 19, SEQ ID NO: 21, SEQ ID NO: 23, SEQ ID NO: 716, SEQ ID NO: 754, SEQ ID NO: 755, SEQ ID NO: 756, SEQ ID NO: 757, SEQ ID NO: 758, SEQ ID NO: 759, SEQ ID NO: 760, SEQ ID NO: 761, SEQ ID NO: 762, SEQ ID NO: 763, SEQ ID NO: 764, SEQ ID NO: 765, SEQ ID NO: 766, SEQ ID NO: 767, SEQ ID NO: 768, SEQ ID NO: 769, or SEQ ID NOs: 958-1026, wherein the PtIP-83 polypeptide has insecticidal activity.

[0038] In some embodiments the nucleic acid molecule encodes a PtIP-83 polypeptide comprising an amino acid sequence of SEQ ID NO: 1, SEQ ID NO: 3, SEQ ID NO: 5, SEQ ID NO: 7, SEQ ID NO: 9, SEQ ID NO: 11, SEQ ID NO: 13, SEQ ID NO: 15, SEQ ID NO: 17, SEQ ID NO: 19, SEQ ID NO: 21, SEQ ID NO: 23, SEQ ID NO: 716, SEQ ID NO: 754, SEQ ID NO: 755, SEQ ID NO: 756, SEQ ID NO: 757, SEQ ID NO: 758, SEQ ID NO: 759, SEQ ID NO: 760, SEQ ID NO: 761, SEQ ID NO: 762, SEQ ID NO: 763, SEQ ID NO: 764, SEQ ID NO: 765, SEQ ID NO: 766, SEQ ID NO: 767, SEQ ID NO: 768, SEQ ID NO: 769, or SEQ ID NOs: 958-1026, having 1, 2, 3, 4, 5, 6, 7, 8, 9, 10 11, 12, 13, 14, 15, 16, 17, 18, 19, 20, 21, 22, 23, 24, 25, 26, 27, 28, 29, 30, 31, 32, 33, 34, 35, 36, 37, 38, 39, 40, 41, 42, 43, 44, 45, 46, 47, 48, 49, 50, 51, 52, 53, 54, 55, 56, 57, 58, 59, 60, 61, 62, 63, 64, 65, 66, 67, 68, 69, 70 or more amino acid substitutions compared to the native amino acid at the corresponding position of SEQ ID NO: 1, SEQ ID NO: 3, SEQ ID NO: 5, SEQ ID NO: 7, SEQ ID NO: 9, SEQ ID NO: 11, SEQ ID NO: 13, SEQ ID NO: 15, SEQ ID NO: 17, SEQ ID NO: 19, SEQ ID NO: 21, SEQ ID NO: 23, SEQ ID NO: 716, SEQ ID NO: 754, SEQ ID NO: 755, SEQ ID NO: 756, SEQ ID NO: 757, SEQ ID NO: 758, SEQ ID NO: 759, SEQ ID NO: 760, SEQ ID NO: 761, SEQ ID NO: 762, SEQ ID NO: 763, SEQ ID NO: 764, SEQ ID NO: 765, SEQ ID NO: 766, SEQ ID NO: 767, SEQ ID NO: 768′ SEQ ID NO: 769 or SEQ ID NOs: 958-1026.

[0039] In some embodiments the nucleic acid molecule encodes a PtIP-83 polypeptide comprising an amino acid sequence of any one of SEQ ID NO: 236-299, SEQ ID NO: 334-367, SEQ ID NO: 398-427, SEQ ID NO: 518-607, SEQ ID NO: 640-645, and SEQ ID NO: 728-737.

[0040] In some embodiments the nucleic acid molecule encoding the PtIP-83 polypeptide is any one of SEQ ID NO: 172-235, SEQ ID NO: 300-333, SEQ ID NO: 368-397, SEQ ID NO: 428-517, SEQ ID NO: 634-639, and SEQ ID NO: 718-727.

[0041] In some embodiments the nucleic acid molecule encodes a PtIP-83 polypeptide variant of SEQ ID NO: 1, wherein the amino acid at position 53 is Val, Ala, Cys or Thr; the amino acid at position 54 is Lys, Ala, Cys, Asp, Glu, Gly, His, Ile, Leu, Met, Asn, Gln, Arg, Ser or Thr; the amino acid at position 55 is Arg, Ala, Asp, Glu, Phe, Gly, His, Lys, Leu, Met, Asn, Gln, Ser, Thr, Val, Trp or Tyr; the amino acid at position 56 is Leu, Glu, Phe, Ile, Met, Thr or Val; the amino acid at position 57 is Tyr, Cys, Ile, Leu, Met, Thr or Val; the amino acid at position 58 is Val, Cys, Ile or Leu; the amino acid at position 59 is Phe, Leu, Met, Val or Tyr; the amino acid at position 60 is Ala, Cys, Gly, Ser, Thr or Val; the amino acid at position 61 is Asp, Glu, His or Ser; the amino acid at position 62 is Val, Ala, Cys, Ile, Leu or Thr; the amino acid at position 63 is Val, Ala, Cys, Ile, Leu, Met or Thr; the amino acid at position 64 is Glu, Ala, Cys, Phe, Gly, His, Ile, Leu, Met, Asn, Gln, Arg, Ser, Thr, Val, Trp or Tyr; the amino acid at position 65 is Leu, Ala, Cys, Phe, His, Ile, Met, Asn, Gln, Thr, Val or Trp; the amino acid at position 66 is Pro, Asp, Gly, Met, Gln or Arg; the amino acid at position 363 is Gln, Ala, Cys, Glu, Phe, Gly, His, Lys, Leu, Asn, Arg, Ser, Thr, Val or Trp; the amino acid at position 364 is Ile, Ala, Cys, Glu, Phe, His, Lys, Leu, Met, Asn, Gln, Ser, Thr, Val, Trp or Tyr; the amino acid at position 365 is Leu, Ala, Glu, Phe, Gly, His, Ile, Lys, Met, Asn, Arg, Val, Trp or Tyr; the amino acid at position 366 is Gly, Ala, Cys, Phe, His, Ile, Lys, Leu, Met, Asn, Ser, Thr or Val; the amino acid at position 367 is Ser, Ala, Cys, Asp, Glu, Phe, Gly, His, Ile, Leu, Met, Asn, Pro, Gln, Arg, Thr, Val or Trp; the amino acid at position 368 is Tyr, Ala, Cys, Asp, Glu, Phe, Gly, His, Ile, Lys, Leu, Met, Asn, Pro, Gln, Arg, Ser, Thr, Val or Trp; the amino acid at position 369 is Leu, Ala, Cys, Asp, Phe, Gly, Ile, Met, Thr or Val; the amino acid at position 370 is Leu, Ala, Cys, Asp, Glu, Phe, Gly, His, Ile, Lys, Met, Gln, Arg, Ser, Thr, Val, Trp or Tyr; the amino acid at position 371 is Gln, Ala, Cys, Asp, Glu, Phe, Gly, Ile, Lys, Leu, Asn, Arg, Ser, Thr, Val or Trp; the amino acid at position 372 is Gln, Ala, Cys, Asp, Phe, Gly, His, Ile, Leu, Asn, Arg, Ser, Val or Tyr; the amino acid at position 373 is Asn, Ala, Cys, Asp, Phe, Gly, His, Ile, Lys, Gln, Ser, Thr, Val or Trp; the amino acid at position 556 is Trp, Phe, Thr or Tyr; the amino acid at position 557 is Arg, Cys, Asp, Gly, His, Ile, Lys, Leu, Met, Asn, Pro, Gln, Ser, Thr, Val, Trp or Tyr; the amino acid at position 558 is Ala, Cys, Asp, Phe, Gly, His, Ile, Lys, Leu, Asn, Pro, Gln, Arg, Ser, Val, Trp or Tyr; the amino acid at position 559 is Lys, Ala, Cys, Phe, Gly, His, Ile, Leu, Asn, Gln, Arg, Ser, Thr, Val or Tyr; the amino acid at position 560 is Cys, Ala, Phe, Gly, Ile, Met, Asn, Arg, Ser, Thr or Val; the amino acid at position 561 is Lys, Ala, Cys, Asp, Glu, Phe, Gly, His, Ile, Leu, Met, Asn, Arg, Ser, Thr, Val or Tyr; the amino acid at position 562 is Asn, Cys, Asp, Glu, Gly, His, Leu, Met, Arg, Ser, Thr, Val or Tyr; the amino acid at position 563 is Val, Ala, Cys, Asp, Phe, His, Ile, Leu, Met, Asn, Gln, Thr or Trp; the amino acid at position 564 is Ala, Cys, Gly, Met, Gln, Ser, Thr, Val, Trp or Tyr; the amino acid at position 646 is Leu, Ala, Cys, Gly, Ile, Met, Asn, Gln, Ser, Thr or Val; the amino acid at position 647 is Leu, Asp, Gly, Met, Asn, Gln or Thr; the amino acid at position 648 is Met, Ala, Cys, Asp, Glu, Phe, Gly, His, Lys, Leu, Asn, Pro, Gln, Arg, Ser, Thr, Val, Trp or Tyr; the amino acid at position 649 is Pro, Ala, Cys, Asp, Glu, Phe, Gly, His, Lys, Met, Asn, Gln, Arg, Ser, Thr, Trp or Tyr; the amino acid at position 650 is Thr, Ala, Cys, Asp, Phe, Gly, His, Ile, Lys, Leu, Met, Pro, Gln, Arg, Ser, Val or Tyr; the amino acid at position 651 is Glu, Ala, Cys, Asp, Gly, His, Ile, Leu, Met, Asn, Pro, Gln, Arg, Ser, Thr, Val or Tyr; the amino acid at position 652 is Leu, Cys, Phe, Ile, Lys, Met, Pro, Arg, Ser, Thr or Val; the amino acid at position 653 is Thr, Cys, Asp, Glu, Phe, Gly, His, Ile, Lys, Leu, Pro, Arg, Ser, Val or Trp; the amino acid at position 654 is Thr, Ala, Cys, Phe, Ile, Lys, Leu, Met, Pro, Arg, Ser, Val, Trp or Tyr; the amino acid at position 655 is Trp, Phe or Tyr; the amino acid at position 771 is Arg, Ala, Asp, Glu, Phe, Gly, His, Ile, Lys, Leu, Asn, Ser, Thr, Val, Trp or Tyr; the amino acid at position 772 is Arg, Ala, Cys, Asp, Glu, Phe, Gly, His, Ile, Lys, Leu, Met, Pro, Gln, Ser, Thr, Val, Trp or Tyr; the amino acid at position 773 is Asp, Ala, Glu, Phe, Gly, His, Ile, Lys, Leu, Met, Asn, Gln, Arg, Ser, Thr, Val, Trp or Tyr; the amino acid at position 774 is Gln, Ala, Asp, Gly, His, Ile, Lys, Leu, Met, Asn, Pro, Arg, Ser, Thr, Val, Trp or Tyr; the amino acid at position 775 is Val, Ala, Cys, Asp, Glu, Gly, His, Ile, Asn, Pro, Gln, Arg, Ser, Thr or Tyr; the amino acid at position 776 is Leu, Ala, Cys, Asp, Glu, Phe, Gly, His, Ile, Lys, Asn, Pro, Gln, Arg, Ser, Thr, Val or Tyr; the amino acid at position 777 is Pro, Ala, Cys, Asp, Glu, Phe, Gly, His, Lys, Leu, Met, Asn, Gln, Ser, Thr, Val, Trp or Tyr; the amino acid at position 778 is Phe, Ala, His, Ile, Leu, Met, Asn, Gln, Ser, Val, Trp or Tyr; the amino acid at position 779 is Gln, Ala, Cys, Asp, Glu, Gly, His, Lys, Leu, Asn, Pro, Arg, Ser, Thr or Val; the amino acid at position 780 is Ala, Cys, Asn, Pro, Gln or Ser; the amino acid at position 781 is Ala, Cys, Asp, Glu, Phe, Gly, His, Ile, Asn, Gln, Arg, Ser, Thr, Val, Trp or Tyr; the amino acid at position 782 is Ala, Cys, Asp, Glu, Phe, Gly, His, Ile, Lys, Met, Pro, Gln, Arg, Ser, Thr, Val, Trp or Tyr; the amino acid at position 783 is Pro, Ala, Cys, Asp, Glu, Gly, His, Asn, Gln, Arg, Ser, Thr or Val; the amino acid at position 784 is Leu, Ala, Glu, Phe, His, Ile, Lys, Met, Asn, Pro, Gln, Ser, Thr, Val or Trp; the amino acid at position 785 is Asn, Ala, Cys, Glu, Phe, Gly, His, Ile, Lys, Leu, Met, Gln, Arg, Ser, Thr, Val, Trp or Tyr; and the amino acid at position 786 is Tyr, Phe, Ile, Leu or Trp.

[0042] In some embodiments the nucleic acid molecule encodes a PtIP-83 polypeptide variant of SEQ ID NO: 1, wherein the amino acid at position 1 is Met or deleted; the amino acid at position 2 is Ala or deleted; the amino acid at position 3 is Leu, Val or deleted; the amino acid at position 4 is Val, Met or Leu; the amino acid at position 7 is Gly or Ser; the amino acid at position 8 is Lys or Thr; the amino acid at position 10 is Phe or Tyr; the amino acid at position 11 is Glu or Arg; the amino acid at position 18 is Met or Ile; the amino acid at position 19 is Gly, Pro or Ala; the amino acid at position 20 is Val or deleted; the amino acid at position 21 is Leu or Val; the amino acid at position 23 is Arg or Gln; the amino acid at position 37 is Val or Leu; the amino acid at position 38 is Arg or Asn; the amino acid at position 40 is Ala or Ser; the amino acid at position 43 is Asn or Asp; the amino acid at position 45 is Gly or Ala; the amino acid at position 46 is Gln or Glu; the amino acid at position 48 is Glu, Pro or Val; the amino acid at position 51 is Glu or Gly; the amino acid at position 52 is Lys, Arg or Thr; the amino acid at position 56 is Leu or Val; the amino acid at position 59 is Phe or Leu; the amino acid at position 66 is Pro or Ala; the amino acid at position 67 is Val, Pro or Thr; the amino acid at position 68 is Val, Arg, Phe or Gly; the amino acid at position 69 is Glu, Ala or Lys; the amino acid at position 70 is Trp, Thr, His, Tyr or Arg; the amino acid at position 71 is Arg, Pro or deleted; the amino acid at position 72 is Trp, Asp, Leu or deleted; the amino acid at position 73 is Pro, Gln, Asn, His or deleted; the amino acid at position 74 is Pro, Met or Thr; the amino acid at position 75 is Gln, His or Arg; the amino acid at position 76 is Ile, Met or Leu; the amino acid at position 84 is Ile or Val; the amino acid at position 91 is Trp or Phe; the amino acid at position 93 is Thr or Ile; the amino acid at position 94 is Asp or Gly; the amino acid at position 96 is Arg or Ser; the amino acid at position 97 is Gln, Phe or Arg; the amino acid at position 98 is Ser or deleted; the amino acid at position 99 is Asp or Ala; the amino acid at position 100 is Thr or Ala; the amino acid at position 101 is Glu, Thr or Trp the amino acid at position 103 is His, Arg, Glu or Gln; the amino acid at position 105 is Thr or Pro; the amino acid at position 108 is Lys, Gln or Glu; the amino acid at position 109 is Leu or Val; the amino acid at position 111 is Ala or Thr; the amino acid at position 112 is Ile, Arg, Thr or deleted; the amino acid at position 113 is Gln, Ala, Gly or deleted; the amino acid at position 114 is Arg, Glu or Ile; the amino acid at position 115 is Glu or Gln; the amino acid at position 116 is Glu, Asn, Gln or Arg; the amino acid at position 117 is Asn, Val, Tyr or Phe; the amino acid at position 118 is Arg or Lys; the amino acid at position 119 is Trp or Ser; the amino acid at position 122 is Thr, Lys or Ala; the amino acid at position 124 is Ala or Thr; the amino acid at position 126 is Gly or Asp; the amino acid at position 127 is Met or Ala; the amino acid at position 128 is Asn or Lys; the amino acid at position 131 is Val, Ile or Thr; the amino acid at position 133 is Ile or Val; the amino acid at position 134 is His or Tyr; the amino acid at position 135 is Ala or Gly; the amino acid at position 137 is Glu or Lys; the amino acid at position 139 is Gln or Glu; the amino acid at position 140 is Val, Arg or Leu; the amino acid at position 141 is Gly or Ser; the amino acid at position 142 is Val or Pro; the amino acid at position 144 is Thr, Leu, Phe or Tyr; the amino acid at position 145 is Met, Pro or Asn; the amino acid at position 146 is Ser, Gly or Asn; the amino acid at position 147 is Trp or Asn; the amino acid at position 148 is Ser, Ala or Pro; the amino acid at position 149 is Ser or deleted; the amino acid at position 150 is Val, Ile or Tyr; the amino acid at position 152 is Arg, Ala, Val or Gly; the amino acid at position 154 is Ser, Trp or Glu; the amino acid at position 156 is Leu, Asp or Gln; the amino acid at position 158 is Ser or Cys; the amino acid at position 159 is Val, Thr or Ile; the amino acid at position 162 is Ser or Ala; the amino acid at position 163 is Gly or deleted; the amino acid at position 164 is Phe or deleted; the amino acid at position 165 is Arg or Ala; the amino acid at position 166 is Ala, Arg, Met or Phe; the amino acid at position 167 is Val or His; the amino acid at position 168 is Ser or Asn; the amino acid at position 169 is Val, His or Thr; the amino acid at position 170 is Phe or Val; the amino acid at position 171 is Glu, Asn or Asp; the amino acid at position 172 is Val, Ala, Arg or Glu; the amino acid at position 175 is Ser, Arg or Trp; the amino acid at position 176 is Val or Ile; the amino acid at position 177 is Arg or Ile; the amino acid at position 179 is Thr, Ile, Val or Ser; the amino acid at position 180 is Leu, Phe or Thr; the amino acid at position 181 is Gly, Thr, Gln or Ser; the amino acid at position 182 is Ala, Leu, Phe or Ile; the amino acid at position 183 is Thr or Gly; the amino acid at position 184 is Leu, Thr, Ser or Arg; the amino acid at position 185 is Arg, Gly, Asp or Ala; the amino acid at position 186 is Pro, Val or Gln; the amino acid at position 187 is Asp, Thr or Ser; the amino acid at position 188 is His, Gly or Ala; the amino acid at position 189 is Ala, Arg, Pro or deleted; the amino acid at position 190 is Leu, Asn or deleted; the amino acid at position 191 is Tyr or deleted; the amino acid at position 192 is Ser, Ile, Val or Asn; the amino acid at position 193 is Thr or Asp; the amino acid at position 194 is Thr or Ser; the amino acid at position 195 is Met or Thr; the amino acid at position 196 is Gln, His, Leu or Ser; the amino acid at position 197 is Ala, Gly or Leu; the amino acid at position 198 is Thr, Glu or Ala; the amino acid at position 199 is Pro or Arg; the amino acid at position 200 is Asn, Ser, Thr or Gly; the amino acid at position 201 is Ala, Leu, Glu or Trp; the amino acid at position 202 is Ser, Asp, Phe or Leu; the amino acid at position 203 is His, Pro, Gly or Ser; the amino acid at position 204 is Ile, Trp, His or Gly; the amino acid at position 205 is Ser, Asn or Ile; the amino acid at position 206 is Ala, Gly, Asp, Tyr or Arg; the amino acid at position 207 is Phe, Val or Leu; the amino acid at position 208 is Asn, Ser, Pro or Leu; the amino acid at position 210 is Arg, Asp, Glu or Tyr; the amino acid at position 211 is Ile, Ser or Thr; the amino acid at position 212 is Val, Ala or Asp; the amino acid at position 214 is Pro or Arg; the amino acid at position 215 is Ser or Thr; the amino acid at position 217 is Tyr or Phe; the amino acid at position 218 is Arg or Ser; the amino acid at position 219 is Val or Ala; the amino acid at position 220 is Cys, Leu or Ser; the amino acid at position 221 is Pro or His; the amino acid at position 222 is Leu, Arg or Ser; the amino acid at position 224 is Asn or Ser; the amino acid at position 225 is Asp, Arg or Thr; the amino acid at position 226 is Thr or Asn; the amino acid at position 227 is Asp, Leu or deleted; the amino acid at position 228 is Thr or deleted; the amino acid at position 229 is Tyr or deleted; the amino acid at position 230 is Leu or deleted; the amino acid at position 231 is Gly or deleted; the amino acid at position 232 is Ile or deleted; the amino acid at position 233 is Pro or deleted; the amino acid at position 234 is Ala, Pro or deleted; the amino acid at position 235 is Asp, Ile or Val; the amino acid at position 236 is Val, Ser or Glu; the amino acid at position 237 is Ala, Phe or Tyr; the amino acid at position 238 is Ala or Thr; the amino acid at position 239 is Val, Ser or Gly; the amino acid at position 240 is Leu or Ile; the amino acid at position 243 is Asp or Glu; the amino acid at position 249 is Asn or Ser; the amino acid at position 252 is Leu or Met; the amino acid at position 257 is Thr or Ser; the amino acid at position 259 is His or Leu; the amino acid at position 266 is Ala or Val; the amino acid at position 267 is Cys or Gly; the amino acid at position 268 is His, Arg or Tyr; the amino acid at position 272 is Asp or Glu; the amino acid at position 273 is Val, Met, Ile or Leu; the amino acid at position 274 is Val or Met; the amino acid at position 278 is Gly or Ala; the amino acid at position 279 is Glu or Val; the amino acid at position 281 is Leu or Ala; the amino acid at position 282 is Asn, Leu or Ile; the amino acid at position 285 is Asn or Ser; the amino acid at position 286 is Lys, Asp or Glu; the amino acid at position 287 is Leu or Val; the amino acid at position 290 is Pro, Gln or Arg; the amino acid at position 291 is Leu or Val; the amino acid at position 292 is Lys or Val; the amino acid at position 293 is Glu or Gln; the amino acid at position 294 is Ser, Asn or Lys; the amino acid at position 295 is Thr or Ser; the amino acid at position 296 is Gln or His; the amino acid at position 297 is Leu or Met; the amino acid at position 300 is Ser or Thr; the amino acid at position 301 is Glu or Ala; the amino acid at position 302 is Ser, Pro or Ala; the amino acid at position 304 is Lys or Asn; the amino acid at position 313 is Val or Ile; the amino acid at position 314 is His, Glu or Gln; the amino acid at position 315 is Ala, Cys or Ser; the amino acid at position 316 is Ala or Val; the amino acid at position 317 is Met or Ile; the amino acid at position 319 is Met or Ile; the amino acid at position 320 is Val or Gly; the amino acid at position 321 is Arg or Pro; the amino acid at position 322 is Ile or Phe; the amino acid at position 323 is Gly or Val; the amino acid at position 324 is Leu or Ser; the amino acid at position 336 is Ser or Asn; the amino acid at position 339 is Asn, Lys or Arg; the amino acid at position 350 is Arg or Gln; the amino acid at position 351 is Glu or Asp; the amino acid at position 353 is Lys or Arg; the amino acid at position 354 is Gln or Arg; the amino acid at position 355 is Phe or Leu; the amino acid at position 356 is Lys or Arg; the amino acid at position 360 is Ile, Val or Ala; the amino acid at position 365 is Leu or Phe; the amino acid at position 371 is or Glu; the amino acid at position 372 is or Lys; the amino acid at position 374 is Arg or Lys; the amino acid at position 376 is Phe or Leu; the amino acid at position 378 is Glu or Asp; the amino acid at position 381 is Leu or Val; the amino acid at position 388 is Ala or Ser; the amino acid at position 395 is Arg or Lys; the amino acid at position 396 is Glu, Gln or Gly; the amino acid at position 399 is Asp or Asn; the amino acid at position 400 is Asn, Thr or Asp; the amino acid at position 401 is Thr or Ala; the amino acid at position 402 is Phe, Ile or Leu; the amino acid at position 406 is Asp or Glu; the amino acid at position 408 is Leu or Met; the amino acid at position 410 is Gly or Leu; the amino acid at position 414 is Ala or Glu; the amino acid at position 416 is Ser, Asn or Asp; the amino acid at position 417 is Ser, Arg or Gly; the amino acid at position 423 is Lys or Gln; the amino acid at position 431 is Arg or Lys; the amino acid at position 432 is Gln or Glu; the amino acid at position 436 is Arg or Glu; the amino acid at position 440 is Asn or Arg; the amino acid at position 442 is Leu or Val; the amino acid at position 447 is Ser, Lys or Arg; the amino acid at position 448 is Ala or Ser; the amino acid at position 451 is Gln or Met; the amino acid at position 453 is Gly or Ala; the amino acid at position 455 is Ala or Val; the amino acid at position 457 is Leu or Val; the amino acid at position 467 is Val or Ala; the amino acid at position 471 is Gly or Ala; the amino acid at position 475 is Ser or Asn; the amino acid at position 483 is Gly or Ala; the amino acid at position 493 is Gln or Gly; the amino acid at position 504 is Val or Ile; the amino acid at position 506 is Asp or His; the amino acid at position 509 is Asp or Asn; the amino acid at position 510 is Ser or Ala; the amino acid at position 512 is Glu or Asp; the amino acid at position 515 is Gly or Ser; the amino acid at position 516 is Gln or His; the amino acid at position 517 is Ile or Leu; the amino acid at position 519 is Asp, Gly or Gln; the amino acid at position 522 is Val, Glu, Pro or Val; the amino acid at position 525 is Glu or Asp; the amino acid at position 526 is Leu or Met; the amino acid at position 539 is Val or Ile; the amino acid at position 555 is Val or Ala; the amino acid at position 557 is Arg or Lys; the amino acid at position 563 is Val or Met; the amino acid at position 571 is Ser or Cys; the amino acid at position 575 is Val or Glu; the amino acid at position 577 is Met or Ile; the amino acid at position 579 is Glu or Gln; the amino acid at position 583 is Asp or Glu; the amino acid at position 589 is Met or Leu; the amino acid at position 590 is Met or Leu; the amino acid at position 593 is Met or Ile; the amino acid at position 595 is Arg or Gln; the amino acid at position 596 is Ser or Thr; the amino acid at position 597 is Gln or His; the amino acid at position 607 is Ala or Val; the amino acid at position 608 is Asp or Asn; the amino acid at position 612 is Tyr, His or Phe; the amino acid at position 617 is Thr or Ile; the amino acid at position 618 is Gln or His; the amino acid at position 625 is Arg or Ser; the amino acid at position 626 is Met or Ile; the amino acid at position 628 is Leu or Ile; the amino acid at position 633 is Ile or Met; the amino acid at position 634 is Leu or Met; the amino acid at position 642 is Arg or Met; the amino acid at position 648 is Met or Thr; the amino acid at position 651 is Glu or Gln; the amino acid at position 654 is Thr, Val or Ala; the amino acid at position 658 is Gly or Arg; the amino acid at position 663 is Gly or Ala; the amino acid at position 664 is Asp or Asn; the amino acid at position 668 is Ala or Thr; the amino acid at position 669 is Gln or His; the amino acid at position 671 is Asn or Ser the amino acid at position 675 is Ile, Val or Ser; the amino acid at position 678 is Met, Ile, Ala or Thr; the amino acid at position 682 is Pro or Gln; the amino acid at position 683 is Ser or Pro; the amino acid at position 685 is Asp or Asn; the amino acid at position 694 is Asp or Gly; the amino acid at position 697 is Asn or Ser; the amino acid at position 704 is Glu or Gly; the amino acid at position 714 is Ala or Gly; the amino acid at position 721 is Ser or Phe; the amino acid at position 722 is Ser or Asn; the amino acid at position 724 is Ser or Thr; the amino acid at position 734 is His or Gln; the amino acid at position 736 is Val or Ala; the amino acid at position 737 is Lys or Gln; the amino acid at position 739 is Ala or Ser; the amino acid at position 740 is Ser or Met; the amino acid at position 741 is Gly or Asn; the amino acid at position 742 is Ile or Gly; the amino acid at position 743 is Gly or deleted; the amino acid at position 745 is Gly or Asp; the amino acid at position 751 is Thr, Ser or Ala; the amino acid at position 753 is Gln or Arg; the amino acid at position 754 is Thr or Ser; the amino acid at position 756 is Thr or Ile; the amino acid at position 757 is Val or Ile; the amino acid at position 766 is Ile or Val; the amino acid at position 773 is Asp or Glu; the amino acid at position 774 is Gln or Glu; the amino acid at position 776 is Leu or Met; the amino acid at position 777 is Pro or Thr; the amino acid at position 782 is Ala, Asp or Val; the amino acid at position 786 is Tyr or Phe; the amino acid at position 787 is His or Gln; the amino acid at position 788 is Tyr or Met; the amino acid at position 789 is Ala or Arg; the amino acid at position 790 is Tyr or Thr; the amino acid at position 791 is Arg or Ala; the amino acid at position 792 is Leu or Ser; the amino acid at position 796 is Asp or Glu; the amino acid at position 797 is Ser, Thr or Ala the amino acid at position 802 is Glu or Gln; the amino acid at position 806 is Gln, Asp, Glu or His; the amino acid at position 810 is Lys or Thr; the amino acid at position 819 is Arg or His; the amino acid at position 829 is Lys, Ser, Ala or Pro; the amino acid at position 832 is Ala, Lys or Glu; the amino acid at position 833 is Gly or Glu; the amino acid at position 842 is Leu or Pro; the amino acid at position 847 is Gln or Glu; the amino acid at position 848 is Ile or Val; the amino acid at position 849 is Val or Ala; the amino acid at position 855 is Thr or Met; the amino acid at position 860 is Ile or Val; and the amino acid at position 864 is His or Gln.

[0043] In some embodiments the nucleic acid molecule encodes a PtIP-83 polypeptide variant of SEQ ID NO: 1, wherein the amino acid at position 1 is Met or deleted; the amino acid at position 2 is Ala or deleted; the amino acid at position 3 is Leu, Val, Ile or deleted; the amino acid at position 4 is Val, Met, Ile or Leu; the amino acid at position 7 is Gly, Thr or Ser; the amino acid at position 8 is Lys, Arg, Ser or Thr; the amino acid at position 10 is Phe, Trp or Tyr; the amino acid at position 11 is Glu, Asp, Lys or Arg; the amino acid at position 18 is Met, Val, Leu or Ile; the amino acid at position 19 is Gly, Pro or Ala; the amino acid at position 20 is Val, Ile, Leu or deleted; the amino acid at position 21 is Leu, Ile or Val; the amino acid at position 23 is Arg, Lys, Asn or Gln; the amino acid at position 37 is Val, Ile or Leu; the amino acid at position 38 is Arg, Lys, Gln or Asn; the amino acid at position 40 is Ala, Gly, Thr or Ser; the amino acid at position 43 is Asn, Gln, Glu or Asp; the amino acid at position 45 is Gly or Ala; the amino acid at position 46 is Gln, Asp, Asn or Glu; the amino acid at position 48 is Glu, Asp, Pro, Ile, Leu or Val; the amino acid at position 51 is Glu, Asp, Ala or Gly; the amino acid at position 52 is Lys, Arg, Ser or Thr; the amino acid at position 56 is Leu, Ile or Val; the amino acid at position 59 is Phe, Ile, Val or Leu; the amino acid at position 66 is Pro, Gly or Ala; the amino acid at position 67 is Val, Pro, Ile, Leu, Ser or Thr; the amino acid at position 68 is Val, Arg, Phe, Ile, Leu, Lys or Gly; the amino acid at position 69 is Glu, Ala, Asp, Gly, Arg or Lys; the amino acid at position 70 is Trp, Thr, His, Tyr, Lys or Arg; the amino acid at position 71 is Arg, Pro, Lys or deleted; the amino acid at position 72 is Trp, Asp, Leu, Ile, Val, Glu or deleted; the amino acid at position 73 is Pro, Gln, Asn, His or deleted; the amino acid at position 74 is Pro, Met, Ser or Thr; the amino acid at position 75 is Gln, His, Asn, Lys or Arg; the amino acid at position 76 is Ile, Met, Val or Leu; the amino acid at position 84 is Ile, Leu or Val; the amino acid at position 91 is Trp or Phe; the amino acid at position 93 is Thr, Ser, Leu, Val or Ile; the amino acid at position 94 is Asp, Glu, Ala or Gly; the amino acid at position 96 is Arg, Lys, Thr or Ser; the amino acid at position 97 is Gln, Phe, Asn, Lys or Arg; the amino acid at position 98 is Ser, Thr or deleted; the amino acid at position 99 is Asp, Glu, Gly or Ala; the amino acid at position 100 is Thr, Ser, Gly or Ala; the amino acid at position 101 is Glu, Thr, Asp, Ser or Trp the amino acid at position 103 is His, Arg, Lys, Glu or Gln; the amino acid at position 105 is Thr, Ser or Pro; the amino acid at position 108 is Lys, Arg, Asn, Asp, Gln or Glu; the amino acid at position 109 is Leu, Ile or Val; the amino acid at position 111 is Ala, Ser or Thr; the amino acid at position 112 is Ile, Arg, Thr, Leu, Val, Lys, Ser or deleted; the amino acid at position 113 is Gln, Ala, Gly, Asn or deleted; the amino acid at position 114 is Arg, Glu, Lys, Asp or Ile; the amino acid at position 115 is Glu, Asp, Asn or Gln; the amino acid at position 116 is Glu, Asn, Gln, Asp, Lys or Arg; the amino acid at position 117 is Asn, Val, Tyr, Ile, Leu, Gln, Trp or Phe; the amino acid at position 118 is Arg or Lys; the amino acid at position 119 is Trp, Thr or Ser; the amino acid at position 122 is Thr, Lys, Ser, Arg or Ala; the amino acid at position 124 is Ala, Gly, Ser or Thr; the amino acid at position 126 is Gly, Ala, Glu or Asp; the amino acid at position 127 is Met, Gly or Ala; the amino acid at position 128 is Asn, Gln, Arg or Lys; the amino acid at position 131 is Val, Ile, Leu, Ser or Thr; the amino acid at position 133 is Ile, Leu or Val; the amino acid at position 134 is His or Tyr; the amino acid at position 135 is Ala or Gly; the amino acid at position 137 is Glu, Asp, Arg or Lys; the amino acid at position 139 is Gln, Asn, Asp or Glu; the amino acid at position 140 is Val, Arg, Ile, Lys or Leu; the amino acid at position 141 is Gly, Ala, Thr or Ser; the amino acid at position 142 is Val, Ile, Leu or Pro; the amino acid at position 144 is Thr, Leu, Phe, Ile, Val or Tyr; the amino acid at position 145 is Met, Pro, Gln or Asn; the amino acid at position 146 is Ser, Gly, Thr, Ala, Gln or Asn; the amino acid at position 147 is Trp, Gln, Tyr or Asn; the amino acid at position 148 is Ser, Ala, Thr, Gly or Pro; the amino acid at position 149 is Ser, Thr or deleted; the amino acid at position 150 is Val, Ile, Leu or Tyr; the amino acid at position 152 is Arg, Ala, Val, Ile, Leu, Lys or Gly; the amino acid at position 154 is Ser, Trp, Thr, Asp or Glu; the amino acid at position 156 is Leu, Asp, Ile, Val, Asn, Glu or Gln; the amino acid at position 158 is Ser, Thr or Cys; the amino acid at position 159 is Val, Thr, Leu or Ile; the amino acid at position 162 is Ser, Thr, Gly or Ala; the amino acid at position 163 is Gly, Ala or deleted; the amino acid at position 164 is Phe or deleted; the amino acid at position 165 is Arg, Lys, Gly or Ala; the amino acid at position 166 is Ala, Arg, Met, Lys or Phe; the amino acid at position 167 is Val, Ile, Leu or His; the amino acid at position 168 is Ser, Thr, Gln or Asn; the amino acid at position 169 is Val, His, Ile, Leu, Ser or Thr; the amino acid at position 170 is Phe, Ile, Leu or Val; the amino acid at position 171 is Glu, Asn, Gln or Asp; the amino acid at position 172 is Val, Ala, Arg, Ile, Leu, Gly, Lys, Asp or Glu; the amino acid at position 175 is Ser, Arg, Thr, Lys or Trp; the amino acid at position 176 is Val, Leu or Ile; the amino acid at position 177 is Arg, Lys, Leu, Val or Ile; the amino acid at position 179 is Thr, Ile, Val, Leu or Ser; the amino acid at position 180 is Leu, Phe, Ile, Val, Ser or Thr; the amino acid at position 181 is Gly, Thr, Gln, Asn or Ser; the amino acid at position 182 is Ala, Leu, Phe, Val or Ile; the amino acid at position 183 is Thr, Ser, Ala or Gly; the amino acid at position 184 is Leu, Thr, Ser, Ile, Val, Lys or Arg; the amino acid at position 185 is Arg, Gly, Asp, Lys, Glu or Ala; the amino acid at position 186 is Pro, Val, Ile, Leu, Asn or Gln; the amino acid at position 187 is Asp, Thr, Glu or Ser; the amino acid at position 188 is His, Gly or Ala; the amino acid at position 189 is Ala, Arg, Pro, Lys, Gly or deleted; the amino acid at position 190 is Leu, Asn, Ile, Val, Gln or deleted; the amino acid at position 191 is Tyr or deleted; the amino acid at position 192 is Ser, Ile, Val, Leu, Thr or Asn; the amino acid at position 193 is Thr, Ser, Glu or Asp; the amino acid at position 194 is Thr or Ser; the amino acid at position 195 is Met or Thr; the amino acid at position 196 is Gln, His, Leu, Asn, Ile, Val, Thr or Ser; the amino acid at position 197 is Ala, Gly, Ile, Val or Leu; the amino acid at position 198 is Thr, Glu, Ser, Asp, Gly or Ala; the amino acid at position 199 is Pro, Lys or Arg; the amino acid at position 200 is Asn, Ser, Thr, Gln, Ala or Gly; the amino acid at position 201 is Ala, Leu, Glu, Ile, Asp or Trp; the amino acid at position 202 is Ser, Asp, Phe, Ile, Val, Thr, Glu or Leu; the amino acid at position 203 is His, Pro, Gly, Ala, Thr or Ser; the amino acid at position 204 is Ile, Trp, His, Leu, Val, Ala or Gly; the amino acid at position 205 is Ser, Asn, Leu, Val, Thr, Gln or Ile; the amino acid at position 206 is Ala, Gly, Asp, Tyr, Glu, Lys or Arg; the amino acid at position 207 is Phe, Val, Ile or Leu; the amino acid at position 208 is Asn, Ser, Pro, Gln, Thr, Val, Ile or Leu; the amino acid at position 210 is Arg, Asp, Glu, Lys, Ser or Tyr; the amino acid at position 211 is Ile, Ser, Leu, Val or Thr; the amino acid at position 212 is Val, Ala, Ile, Leu, Glu, Gly or Asp; the amino acid at position 214 is Pro, Lys or Arg; the amino acid at position 215 is Ser or Thr; the amino acid at position 217 is Tyr or Phe; the amino acid at position 218 is Arg, Lys, Thr or Ser; the amino acid at position 219 is Val, Ile, Leu or Ala; the amino acid at position 220 is Cys, Leu, Ile, Val, Thr or Ser; the amino acid at position 221 is Pro or His; the amino acid at position 222 is Leu, Arg, Lys, Ile, Val, Thr or Ser; the amino acid at position 224 is Asn, Gln, Thr or Ser; the amino acid at position 225 is Asp, Arg, Glu, Lys, Ser or Thr; the amino acid at position 226 is Thr, Ser, Gln or Asn; the amino acid at position 227 is Asp, Leu, Glu, Ile, Val or deleted; the amino acid at position 228 is Thr, Ser or deleted; the amino acid at position 229 is Tyr or deleted; the amino acid at position 230 is Leu, Ile, Val or deleted; the amino acid at position 231 is Gly, Ala or deleted; the amino acid at position 232 is Ile, Leu, Val or deleted; the amino acid at position 233 is Pro or deleted; the amino acid at position 234 is Ala, Pro, Gly or deleted; the amino acid at position 235 is Asp, Ile, Leu, Glu or Val; the amino acid at position 236 is Val, Ser, Ile, Leu, Thr, Asp or Glu; the amino acid at position 237 is Ala, Phe or Tyr; the amino acid at position 238 is Ala, Gly, Ser or Thr; the amino acid at position 239 is Val, Ser, Ile, Leu, Thr, Ala or Gly; the amino acid at position 240 is Leu, Val or Ile; the amino acid at position 243 is Asp or Glu; the amino acid at position 249 is Asn, Gln, Thr or Ser; the amino acid at position 252 is Leu, Ile, Val or Met; the amino acid at position 257 is Thr or Ser; the amino acid at position 259 is His, Ile, Val or Leu; the amino acid at position 266 is Ala, Ile, Leu or Val; the amino acid at position 267 is Cys, Ala or Gly; the amino acid at position 268 is His, Arg, Lys or Tyr; the amino acid at position 272 is Asp or Glu; the amino acid at position 273 is Val, Met, Ile or Leu; the amino acid at position 274 is Val, Ile, Leu or Met; the amino acid at position 278 is Gly or Ala; the amino acid at position 279 is Glu, Asp, Gly or Val; the amino acid at position 281 is Leu, Ile, Val, Gly or Ala; the amino acid at position 282 is Asn, Leu or Ile; the amino acid at position 285 is Asn, Gln, Thr or Ser; the amino acid at position 286 is Lys, Asp, Arg or Glu; the amino acid at position 287 is Leu, Ile or Val; the amino acid at position 290 is Pro, Gln, Asn, Lys or Arg; the amino acid at position 291 is Leu, Ile or Val; the amino acid at position 292 is Lys, Arg, Ile, Leu or Val; the amino acid at position 293 is Glu, Asp, Asn or Gln; the amino acid at position 294 is Ser, Asn, Thr, Gln, Arg or Lys; the amino acid at position 295 is Thr or Ser; the amino acid at position 296 is Gln, Asn or His; the amino acid at position 297 is Leu, Ile, Val or Met; the amino acid at position 300 is Ser or Thr; the amino acid at position 301 is Glu, Asp, Gly or Ala; the amino acid at position 302 is Ser, Pro, Thr, Gly or Ala; the amino acid at position 304 is Lys, Arg, Gln or Asn; the amino acid at position 313 is Val, Leu or Ile; the amino acid at position 314 is His, Glu, Asn, Asp or Gln; the amino acid at position 315 is Ala, Cys, Gly, Thr or Ser; the amino acid at position 316 is Ala, Ile, Leu or Val; the amino acid at position 317 is Met, Leu, Val or Ile; the amino acid at position 319 is Met, Leu, Val or Ile; the amino acid at position 320 is Val, Ile, Leu, Ala or Gly; the amino acid at position 321 is Arg, Lys or Pro; the amino acid at position 322 is Ile, Leu, Val or Phe; the amino acid at position 323 is Gly, Ile, Leu or Val; the amino acid at position 324 is Leu, Ile, Val, Thr or Ser; the amino acid at position 336 is Ser, Thr, Gln or Asn; the amino acid at position 339 is Asn, Lys, Gln or Arg; the amino acid at position 350 is Arg, Lys, Asn or Gln; the amino acid at position 351 is Glu or Asp; the amino acid at position 353 is Lys or Arg; the amino acid at position 354 is Gln, Asn, Lys or Arg; the amino acid at position 355 is Phe, Ile, Leu or Leu; the amino acid at position 356 is Lys or Arg; the amino acid at position 360 is Ile, Val, Leu, Gly or Ala; the amino acid at position 365 is Leu, Ile, Val or Phe; the amino acid at position 371 is or Glu or Asp; the amino acid at position 372 is or Lys or Arg; the amino acid at position 374 is Arg or Lys; the amino acid at position 376 is Phe, Ile, Val or Leu; the amino acid at position 378 is Glu or Asp; the amino acid at position 381 is Leu, Ile or Val; the amino acid at position 388 is Ala, Thr, Gly or Ser; the amino acid at position 395 is Arg or Lys; the amino acid at position 396 is Glu, Gln, Asp, Asn, Ala or Gly; the amino acid at position 399 is Asp, Gln, Glu or Asn; the amino acid at position 400 is Asn, Thr, Ser, Glu, Gln or Asp; the amino acid at position 401 is Thr, Ser, Gly or Ala; the amino acid at position 402 is Phe, Ile, Val or Leu; the amino acid at position 406 is Asp or Glu; the amino acid at position 408 is Leu, Ile, Val or Met; the amino acid at position 410 is Gly, Ile, Val, Ala or Leu; the amino acid at position 414 is Ala, Gly, Asp or Glu; the amino acid at position 416 is Ser, Asn, Thr, Gln, Glu or Asp; the amino acid at position 417 is Ser, Arg, Lys, Thr, Ala or Gly; the amino acid at position 423 is Lys, Arg, Asn or Gln; the amino acid at position 431 is Arg or Lys; the amino acid at position 432 is Gln, Asn, Asp or Glu; the amino acid at position 436 is Arg, Lys, Asp or Glu; the amino acid at position 440 is Asn, Gln, Lys or Arg; the amino acid at position 442 is Leu, Ile or Val; the amino acid at position 447 is Ser, Lys, Thr or Arg; the amino acid at position 448 is Ala, Gly, Thr or Ser; the amino acid at position 451 is Gln, Asn or Met; the amino acid at position 453 is Gly or Ala; the amino acid at position 455 is Ala, Leu, Ile or Val; the amino acid at position 457 is Leu, Ile or Val; the amino acid at position 467 is Val, Ile, Leu, Gly or Ala; the amino acid at position 471 is Gly or Ala; the amino acid at position 475 is Ser, Thr, Gln or Asn; the amino acid at position 483 is Gly or Ala; the amino acid at position 493 is Gln, Asn or Gly; the amino acid at position 504 is Val, Leu or Ile; the amino acid at position 506 is Asp, Glu or His; the amino acid at position 509 is Asp, Glu, Gln or Asn; the amino acid at position 510 is Ser, Thr, Gly or Ala; the amino acid at position 512 is Glu or Asp; the amino acid at position 515 is Gly, Ala, Thr or Ser; the amino acid at position 516 is Gln, Asn or His; the amino acid at position 517 is Ile, Val or Leu; the amino acid at position 519 is Asp, Asn, Glu, Gly or Gln; the amino acid at position 522 is Val, Glu, Pro, Ile, Leu or Asp; the amino acid at position 525 is Glu or Asp; the amino acid at position 526 is Leu, Ile, Val or Met; the amino acid at position 539 is Val, Leu or Ile; the amino acid at position 555 is Val, Leu, Ile or Ala; the amino acid at position 557 is Arg or Lys; the amino acid at position 563 is Val, Leu, Ile or Met; the amino acid at position 571 is Ser, Thr or Cys; the amino acid at position 575 is Val, Leu, Ile, Asp or Glu; the amino acid at position 577 is Met, Leu, Val or Ile; the amino acid at position 579 is Glu, Asp, Asn or Gln; the amino acid at position 583 is Asp or Glu; the amino acid at position 589 is Met, Ile, Val or Leu; the amino acid at position 590 is Met, Ile, Val or Leu; the amino acid at position 593 is Met, Leu, Val or Ile; the amino acid at position 595 is Arg, Lys, Asn or Gln; the amino acid at position 596 is Ser or Thr; the amino acid at position 597 is Gln, Asn or His; the amino acid at position 607 is Ala, Gly, Ile, Leu or Val; the amino acid at position 608 is Asp, Glu, Gln or Asn; the amino acid at position 612 is Tyr, His or Phe; the amino acid at position 617 is Thr, Ser, Leu, Val or Ile; the amino acid at position 618 is Gln, Asn or His; the amino acid at position 625 is Arg, Lys, Thr or Ser; the amino acid at position 626 is Met, Leu, Val or Ile; the amino acid at position 628 is Leu, Val or Ile; the amino acid at position 633 is Ile, Leu, Val or Met; the amino acid at position 634 is Leu, Ile, Val or Met; the amino acid at position 642 is Arg, Lys or Met; the amino acid at position 648 is Met, Ser or Thr; the amino acid at position 651 is Glu, Asp, Asn or Gln; the amino acid at position 654 is Thr, Val, Ser, Ile, Leu, Gly or Ala; the amino acid at position 658 is Gly, Lys, Ala or Arg; the amino acid at position 663 is Gly or Ala; the amino acid at position 664 is Asp, Glu, Gln or Asn; the amino acid at position 668 is Ala, Gly, Ser or Thr; the amino acid at position 669 is Gln, Asn or His; the amino acid at position 671 is Asn, Gln, Thr or Ser the amino acid at position 675 is Ile, Val, Ile, Thr or Ser; the amino acid at position 678 is Met, Ile, Ala, Leu, Ser or Thr; the amino acid at position 682 is Pro, Asn or Gln; the amino acid at position 683 is Ser, Thr or Pro; the amino acid at position 685 is Asp, Glu, Asp or Asn; the amino acid at position 694 is Asp, Glu, Ala or Gly; the amino acid at position 697 is Asn, Gln, Thr or Ser; the amino acid at position 704 is Glu, Asp, Ala or Gly; the amino acid at position 714 is Ala or Gly; the amino acid at position 721 is Ser, Thr or Phe; the amino acid at position 722 is Ser, Thr, Gln or Asn; the amino acid at position 724 is Ser or Thr; the amino acid at position 734 is His, Asn or Gln; the amino acid at position 736 is Val, Leu, Ile or Ala; the amino acid at position 737 is Lys, Arg, Asn or Gln; the amino acid at position 739 is Ala, Gly, Thr or Ser; the amino acid at position 740 is Ser, Thr or Met; the amino acid at position 741 is Gly, Ala, Gln or Asn; the amino acid at position 742 is Ile, Leu, Val, Ala or Gly; the amino acid at position 743 is Gly or deleted; the amino acid at position 745 is Gly, Ala, Glu or Asp; the amino acid at position 751 is Thr, Ser, Gly or Ala; the amino acid at position 753 is Gln, Asn, Lys or Arg; the amino acid at position 754 is Thr or Ser; the amino acid at position 756 is Thr, Ser, Leu, Val or Ile; the amino acid at position 757 is Val, Leu or Ile; the amino acid at position 766 is Ile, Leu or Val; the amino acid at position 773 is Asp or Glu; the amino acid at position 774 is Gln, Asn, Asp or Glu; the amino acid at position 776 is Leu, Ile, Val or Met; the amino acid at position 777 is Pro, Ser or Thr; the amino acid at position 782 is Ala, Asp, Glu, Ile, Leu or Val; the amino acid at position 786 is Tyr or Phe; the amino acid at position 787 is His, Asn or Gln; the amino acid at position 788 is Tyr or Met; the amino acid at position 789 is Ala, Lys or Arg; the amino acid at position 790 is Tyr or Thr; the amino acid at position 791 is Arg, Lys, Gly or Ala; the amino acid at position 792 is Leu, Ile, Val, Thr or Ser; the amino acid at position 796 is Asp or Glu; the amino acid at position 797 is Ser, Thr or Ala the amino acid at position 802 is Glu, Lys, Asp, Asn or Gln; the amino acid at position 806 is Gln, Asp, Glu, Asn or His; the amino acid at position 810 is Lys, Arg or Thr; the amino acid at position 819 is Arg, Lys or His; the amino acid at position 829 is Lys, Ser, Ala or Pro; the amino acid at position 832 is Ala, Lys, Arg, Asp or Glu; the amino acid at position 833 is Gly, Ala, Asp or Glu; the amino acid at position 842 is Leu, Ile, Val or Pro; the amino acid at position 847 is Gln, Asn, Asp or Glu; the amino acid at position 848 is Ile, Leu or Val; the amino acid at position 849 is Val, Leu, Ile, Gly or Ala; the amino acid at position 855 is Thr, Ser or Met; the amino acid at position 860 is Ile, Leu or Val; the amino acid at position 864 is His, Asn or Gln;

[0044] In some embodiments the nucleic acid molecule encodes a PtIP-83 polypeptide variant of SEQ ID NO: 1, wherein the amino acid at position 1 is Met or deleted; the amino acid at position 2 is Ala or deleted; the amino acid at position 3 is Leu, Val, Ile or deleted; the amino acid at position 4 is Val, Met, Ile or Leu; the amino acid at position 7 is Gly, Thr or Ser; the amino acid at position 8 is Lys, Arg, Ser or Thr; the amino acid at position 10 is Phe, Trp or Tyr; the amino acid at position 11 is Glu, Asp, Lys or Arg; the amino acid at position 18 is Met, Val, Leu or Ile; the amino acid at position 19 is Gly, Pro or Ala; the amino acid at position 20 is Val, Ile, Leu or deleted; the amino acid at position 21 is Leu, Ile or Val; the amino acid at position 23 is Arg, Lys, Asn or Gln; the amino acid at position 37 is Val, Ile or Leu; the amino acid at position 38 is Arg, Lys, Gln or Asn; the amino acid at position 40 is Ala, Gly, Thr or Ser; the amino acid at position 43 is Asn, Gln, Glu or Asp; the amino acid at position 45 is Gly or Ala; the amino acid at position 46 is Gln, Asp, Asn or Glu; the amino acid at position 48 is Glu, Asp, Pro, Ile, Leu or Val; the amino acid at position 51 is Glu, Asp, Ala or Gly; the amino acid at position 52 is Lys, Arg, Ser or Thr; the amino acid at position 53 is Val, Ala, Cys or Thr; the amino acid at position 54 is Lys, Ala, Cys, Asp, Glu, Gly, His, Ile, Leu, Met, Asn, Gln, Arg, Ser or Thr; the amino acid at position 55 is Arg, Ala, Asp, Glu, Phe, Gly, His, Lys, Leu, Met, Asn, Gln, Ser, Thr, Val, Trp or Tyr; the amino acid at position 56 is Leu, Glu, Phe, Ile, Met, Thr or Val; the amino acid at position 57 is Tyr, Cys, Ile, Leu, Met, Thr or Val; the amino acid at position 58 is Val, Cys, Ile or Leu; the amino acid at position 59 is Phe, Leu, Met, Val or Tyr; the amino acid at position 60 is Ala, Cys, Gly, Ser, Thr or Val; the amino acid at position 61 is Asp, Glu, His or Ser; the amino acid at position 62 is Val, Ala, Cys, Ile, Leu or Thr; the amino acid at position 63 is Val, Ala, Cys, Ile, Leu, Met or Thr; the amino acid at position 64 is Glu, Ala, Cys, Phe, Gly, His, Ile, Leu, Met, Asn, Gln, Arg, Ser, Thr, Val, Trp or Tyr; the amino acid at position 65 is Leu, Ala, Cys, Phe, His, Ile, Met, Asn, Gln, Thr, Val or Trp; the amino acid at position 66 is Pro, Asp, Gly, Met, Gln or Arg; the amino acid at position 67 is Val, Pro, Ile, Leu, Ser or Thr; the amino acid at position 68 is Val, Arg, Phe, Ile, Leu, Lys or Gly; the amino acid at position 69 is Glu, Ala, Asp, Gly, Arg or Lys; the amino acid at position 70 is Trp, Thr, His, Tyr, Lys or Arg; the amino acid at position 71 is Arg, Pro, Lys or deleted; the amino acid at position 72 is Trp, Asp, Leu, Ile, Val, Glu or deleted; the amino acid at position 73 is Pro, Gln, Asn, His or deleted; the amino acid at position 74 is Pro, Met, Ser or Thr; the amino acid at position 75 is Gln, His, Asn, Lys or Arg; the amino acid at position 76 is Ile, Met, Val or Leu; the amino acid at position 84 is Ile, Leu or Val; the amino acid at position 91 is Trp or Phe; the amino acid at position 93 is Thr, Ser, Leu, Val or Ile; the amino acid at position 94 is Asp, Glu, Ala or Gly; the amino acid at position 96 is Arg, Lys, Thr or Ser; the amino acid at position 97 is Gln, Phe, Asn, Lys or Arg; the amino acid at position 98 is Ser, Thr or deleted; the amino acid at position 99 is Asp, Glu, Gly or Ala; the amino acid at position 100 is Thr, Ser, Gly or Ala; the amino acid at position 101 is Glu, Thr, Asp, Ser or Trp the amino acid at position 103 is His, Arg, Lys, Glu or Gln; the amino acid at position 105 is Thr, Ser or Pro; the amino acid at position 108 is Lys, Arg, Asn, Asp, Gln or Glu; the amino acid at position 109 is Leu, Ile or Val; the amino acid at position 111 is Ala, Ser or Thr; the amino acid at position 112 is Ile, Arg, Thr, Leu, Val, Lys, Ser or deleted; the amino acid at position 113 is Gln, Ala, Gly, Asn or deleted; the amino acid at position 114 is Arg, Glu, Lys, Asp or Ile; the amino acid at position 115 is Glu, Asp, Asn or Gln; the amino acid at position 116 is Glu, Asn, Gln, Asp, Lys or Arg; the amino acid at position 117 is Asn, Val, Tyr, Ile, Leu, Gln, Trp or Phe; the amino acid at position 118 is Arg or Lys; the amino acid at position 119 is Trp, Thr or Ser; the amino acid at position 122 is Thr, Lys, Ser, Arg or Ala; the amino acid at position 124 is Ala, Gly, Ser or Thr; the amino acid at position 126 is Gly, Ala, Glu or Asp; the amino acid at position 127 is Met, Gly or Ala; the amino acid at position 128 is Asn, Gln, Arg or Lys; the amino acid at position 131 is Val, Ile, Leu, Ser or Thr; the amino acid at position 133 is Ile, Leu or Val; the amino acid at position 134 is His or Tyr; the amino acid at position 135 is Ala or Gly; the amino acid at position 137 is Glu, Asp, Arg or Lys; the amino acid at position 139 is Gln, Asn, Asp or Glu; the amino acid at position 140 is Val, Arg, Ile, Lys or Leu; the amino acid at position 141 is Gly, Ala, Thr or Ser; the amino acid at position 142 is Val, Ile, Leu or Pro; the amino acid at position 144 is Thr, Leu, Phe, Ile, Val or Tyr; the amino acid at position 145 is Met, Pro, Gln or Asn; the amino acid at position 146 is Ser, Gly, Thr, Ala, Gln or Asn; the amino acid at position 147 is Trp, Gln, Tyr or Asn; the amino acid at position 148 is Ser, Ala, Thr, Gly or Pro; the amino acid at position 149 is Ser, Thr or deleted; the amino acid at position 150 is Val, Ile, Leu or Tyr; the amino acid at position 152 is Arg, Ala, Val, Ile, Leu, Lys or Gly; the amino acid at position 154 is Ser, Trp, Thr, Asp or Glu; the amino acid at position 156 is Leu, Asp, Ile, Val, Asn, Glu or Gln; the amino acid at position 158 is Ser, Thr or Cys; the amino acid at position 159 is Val, Thr, Leu or Ile; the amino acid at position 162 is Ser, Thr, Gly or Ala; the amino acid at position 163 is Gly, Ala or deleted; the amino acid at position 164 is Phe or deleted; the amino acid at position 165 is Arg, Lys, Gly or Ala; the amino acid at position 166 is Ala, Arg, Met, Lys or Phe; the amino acid at position 167 is Val, Ile, Leu or His; the amino acid at position 168 is Ser, Thr, Gln or Asn; the amino acid at position 169 is Val, His, Ile, Leu, Ser or Thr; the amino acid at position 170 is Phe, Ile, Leu or Val; the amino acid at position 171 is Glu, Asn, Gln or Asp; the amino acid at position 172 is Val, Ala, Arg, Ile, Leu, Gly, Lys, Asp or Glu; the amino acid at position 175 is Ser, Arg, Thr, Lys or Trp; the amino acid at position 176 is Val, Leu or Ile; the amino acid at position 177 is Arg, Lys, Leu, Val or Ile; the amino acid at position 179 is Thr, Ile, Val, Leu or Ser; the amino acid at position 180 is Leu, Phe, Ile, Val, Ser or Thr; the amino acid at position 181 is Gly, Thr, Gln, Asn or Ser; the amino acid at position 182 is Ala, Leu, Phe, Val or Ile; the amino acid at position 183 is Thr, Ser, Ala or Gly; the amino acid at position 184 is Leu, Thr, Ser, Ile, Val, Lys or Arg; the amino acid at position 185 is Arg, Gly, Asp, Lys, Glu or Ala; the amino acid at position 186 is Pro, Val, Ile, Leu, Asn or Gln; the amino acid at position 187 is Asp, Thr, Glu or Ser; the amino acid at position 188 is His, Gly or Ala; the amino acid at position 189 is Ala, Arg, Pro, Lys, Gly or deleted; the amino acid at position 190 is Leu, Asn, Ile, Val, Gln or deleted; the amino acid at position 191 is Tyr or deleted; the amino acid at position 192 is Ser, Ile, Val, Leu, Thr or Asn; the amino acid at position 193 is Thr, Ser, Glu or Asp; the amino acid at position 194 is Thr or Ser; the amino acid at position 195 is Met or Thr; the amino acid at position 196 is Gln, His, Leu, Asn, Ile, Val, Thr or Ser; the amino acid at position 197 is Ala, Gly, Ile, Val or Leu; the amino acid at position 198 is Thr, Glu, Ser, Asp, Gly or Ala; the amino acid at position 199 is Pro, Lys or Arg; the amino acid at position 200 is Asn, Ser, Thr, Gln, Ala or Gly; the amino acid at position 201 is Ala, Leu, Glu, Ile, Asp or Trp; the amino acid at position 202 is Ser, Asp, Phe, Ile, Val, Thr, Glu or Leu; the amino acid at position 203 is His, Pro, Gly, Ala, Thr or Ser; the amino acid at position 204 is Ile, Trp, His, Leu, Val, Ala or Gly; the amino acid at position 205 is Ser, Asn, Leu, Val, Thr, Gln or Ile; the amino acid at position 206 is Ala, Gly, Asp, Tyr, Glu, Lys or Arg; the amino acid at position 207 is Phe, Val, Ile or Leu; the amino acid at position 208 is Asn, Ser, Pro, Gln, Thr, Val, Ile or Leu; the amino acid at position 210 is Arg, Asp, Glu, Lys, Ser or Tyr; the amino acid at position 211 is Ile, Ser, Leu, Val or Thr; the amino acid at position 212 is Val, Ala, Ile, Leu, Glu, Gly or Asp; the amino acid at position 214 is Pro, Lys or Arg; the amino acid at position 215 is Ser or Thr; the amino acid at position 217 is Tyr or Phe; the amino acid at position 218 is Arg, Lys, Thr or Ser; the amino acid at position 219 is Val, Ile, Leu or Ala; the amino acid at position 220 is Cys, Leu, Ile, Val, Thr or Ser; the amino acid at position 221 is Pro or His; the amino acid at position 222 is Leu, Arg, Lys, Ile, Val, Thr or Ser; the amino acid at position 224 is Asn, Gln, Thr or Ser; the amino acid at position 225 is Asp, Arg, Glu, Lys, Ser or Thr; the amino acid at position 226 is Thr, Ser, Gln or Asn; the amino acid at position 227 is Asp, Leu, Glu, Ile, Val or deleted; the amino acid at position 228 is Thr, Ser or deleted; the amino acid at position 229 is Tyr or deleted; the amino acid at position 230 is Leu, Ile, Val or deleted; the amino acid at position 231 is Gly, Ala or deleted; the amino acid at position 232 is Ile, Leu, Val or deleted; the amino acid at position 233 is Pro or deleted; the amino acid at position 234 is Ala, Pro, Gly or deleted; the amino acid at position 235 is Asp, Ile, Leu, Glu or Val; the amino acid at position 236 is Val, Ser, Ile, Leu, Thr, Asp or Glu; the amino acid at position 237 is Ala, Phe or Tyr; the amino acid at position 238 is Ala, Gly, Ser or Thr; the amino acid at position 239 is Val, Ser, Ile, Leu, Thr, Ala or Gly; the amino acid at position 240 is Leu, Val or Ile; the amino acid at position 243 is Asp or Glu; the amino acid at position 249 is Asn, Gln, Thr or Ser; the amino acid at position 252 is Leu, Ile, Val or Met; the amino acid at position 257 is Thr or Ser; the amino acid at position 259 is His, Ile, Val or Leu; the amino acid at position 266 is Ala, Ile, Leu or Val; the amino acid at position 267 is Cys, Ala or Gly; the amino acid at position 268 is His, Arg, Lys or Tyr; the amino acid at position 272 is Asp or Glu; the amino acid at position 273 is Val, Met, Ile or Leu; the amino acid at position 274 is Val, Ile, Leu or Met; the amino acid at position 278 is Gly or Ala; the amino acid at position 279 is Glu, Asp, Gly or Val; the amino acid at position 281 is Leu, Ile, Val, Gly or Ala; the amino acid at position 282 is Asn, Leu or Ile; the amino acid at position 285 is Asn, Gln, Thr or Ser; the amino acid at position 286 is Lys, Asp, Arg or Glu; the amino acid at position 287 is Leu, Ile or Val; the amino acid at position 290 is Pro, Gln, Asn, Lys or Arg; the amino acid at position 291 is Leu, Ile or Val; the amino acid at position 292 is Lys, Arg, Ile, Leu or Val; the amino acid at position 293 is Glu, Asp, Asn or Gln; the amino acid at position 294 is Ser, Asn, Thr, Gln, Arg or Lys; the amino acid at position 295 is Thr or Ser; the amino acid at position 296 is Gln, Asn or His; the amino acid at position 297 is Leu, Ile, Val or Met; the amino acid at position 300 is Ser or Thr; the amino acid at position 301 is Glu, Asp, Gly or Ala; the amino acid at position 302 is Ser, Pro, Thr, Gly or Ala; the amino acid at position 304 is Lys, Arg, Gln or Asn; the amino acid at position 313 is Val, Leu or Ile; the amino acid at position 314 is His, Glu, Asn, Asp or Gln; the amino acid at position 315 is Ala, Cys, Gly, Thr or Ser; the amino acid at position 316 is Ala, Ile, Leu or Val; the amino acid at position 317 is Met, Leu, Val or Ile; the amino acid at position 319 is Met, Leu, Val or Ile; the amino acid at position 320 is Val, Ile, Leu, Ala or Gly; the amino acid at position 321 is Arg, Lys or Pro; the amino acid at position 322 is Ile, Leu, Val or Phe; the amino acid at position 323 is Gly, Ile, Leu or Val; the amino acid at position 324 is Leu, Ile, Val, Thr or Ser; the amino acid at position 336 is Ser, Thr, Gln or Asn; the amino acid at position 339 is Asn, Lys, Gln or Arg; the amino acid at position 350 is Arg, Lys, Asn or Gln; the amino acid at position 351 is Glu or Asp; the amino acid at position 353 is Lys or Arg; the amino acid at position 354 is Gln, Asn, Lys or Arg; the amino acid at position 355 is Phe, Ile, Leu or Leu; the amino acid at position 356 is Lys or Arg; the amino acid at position 360 is Ile, Val, Leu, Gly or Ala; the amino acid at position 363 is Gln, Ala, Cys, Glu, Phe, Gly, His, Lys, Leu, Asn, Arg, Ser, Thr, Val or Trp; the amino acid at position 364 is Ile, Ala, Cys, Glu, Phe, His, Lys, Leu, Met, Asn, Gln, Ser, Thr, Val, Trp or Tyr; the amino acid at position 365 is Leu, Ala, Glu, Phe, Gly, His, Ile, Lys, Met, Asn, Arg, Val, Trp or Tyr; the amino acid at position 366 is Gly, Ala, Cys, Phe, His, Ile, Lys, Leu, Met, Asn, Ser, Thr or Val; the amino acid at position 367 is Ser, Ala, Cys, Asp, Glu, Phe, Gly, His, Ile, Leu, Met, Asn, Pro, Gln, Arg, Thr, Val or Trp; the amino acid at position 368 is Tyr, Ala, Cys, Asp, Glu, Phe, Gly, His, Ile, Lys, Leu, Met, Asn, Pro, Gln, Arg, Ser, Thr, Val or Trp; the amino acid at position 369 is Leu, Ala, Cys, Asp, Phe, Gly, Ile, Met, Thr or Val; the amino acid at position 370 is Leu, Ala, Cys, Asp, Glu, Phe, Gly, His, Ile, Lys, Met, Gln, Arg, Ser, Thr, Val, Trp or Tyr; the amino acid at position 371 is Gln, Ala, Cys, Asp, Glu, Phe, Gly, Ile, Lys, Leu, Asn, Arg, Ser, Thr, Val or Trp; the amino acid at position 372 is Gln, Ala, Cys, Asp, Phe, Gly, His, Ile, Leu, Asn, Arg, Ser, Val or Tyr; the amino acid at position 373 is Asn, Ala, Cys, Asp, Phe, Gly, His, Ile, Lys, Gln, Ser, Thr, Val or Trp; the amino acid at position 374 is Arg or Lys; the amino acid at position 376 is Phe, Ile, Val or Leu; the amino acid at position 378 is Glu or Asp; the amino acid at position 381 is Leu, Ile or Val; the amino acid at position 388 is Ala, Thr, Gly or Ser; the amino acid at position 395 is Arg or Lys; the amino acid at position 396 is Glu, Gln, Asp, Asn, Ala or Gly; the amino acid at position 399 is Asp, Gln, Glu or Asn; the amino acid at position 400 is Asn, Thr, Ser, Glu, Gln or Asp; the amino acid at position 401 is Thr, Ser, Gly or Ala; the amino acid at position 402 is Phe, Ile, Val or Leu; the amino acid at position 406 is Asp or Glu; the amino acid at position 408 is Leu, Ile, Val or Met; the amino acid at position 410 is Gly, Ile, Val, Ala or Leu; the amino acid at position 414 is Ala, Gly, Asp or Glu; the amino acid at position 416 is Ser, Asn, Thr, Gln, Glu or Asp; the amino acid at position 417 is Ser, Arg, Lys, Thr, Ala or Gly; the amino acid at position 423 is Lys, Arg, Asn or Gln; the amino acid at position 431 is Arg or Lys; the amino acid at position 432 is Gln, Asn, Asp or Glu; the amino acid at position 436 is Arg, Lys, Asp or Glu; the amino acid at position 440 is Asn, Gln, Lys or Arg; the amino acid at position 442 is Leu, Ile or Val; the amino acid at position 447 is Ser, Lys, Thr or Arg; the amino acid at position 448 is Ala, Gly, Thr or Ser; the amino acid at position 451 is Gln, Asn or Met; the amino acid at position 453 is Gly or Ala; the amino acid at position 455 is Ala, Leu, Ile or Val; the amino acid at position 457 is Leu, Ile or Val; the amino acid at position 467 is Val, Ile, Leu, Gly or Ala; the amino acid at position 471 is Gly or Ala; the amino acid at position 475 is Ser, Thr, Gln or Asn; the amino acid at position 483 is Gly or Ala; the amino acid at position 493 is Gln, Asn or Gly; the amino acid at position 504 is Val, Leu or Ile; the amino acid at position 506 is Asp, Glu or His; the amino acid at position 509 is Asp, Glu, Gln or Asn; the amino acid at position 510 is Ser, Thr, Gly or Ala; the amino acid at position 512 is Glu or Asp; the amino acid at position 515 is Gly, Ala, Thr or Ser; the amino acid at position 516 is Gln, Asn or His; the amino acid at position 517 is Ile, Val or Leu; the amino acid at position 519 is Asp, Asn, Glu, Gly or Gln; the amino acid at position 522 is Val, Glu, Pro, Ile, Leu or Asp; the amino acid at position 525 is Glu or Asp; the amino acid at position 526 is Leu, Ile, Val or Met; the amino acid at position 539 is Val, Leu or Ile; the amino acid at position 555 is Val, Leu, Ile or Ala; the amino acid at position 556 is Trp, Phe, Thr or Tyr; the amino acid at position 557 is Arg, Cys, Asp, Gly, His, Ile, Lys, Leu, Met, Asn, Pro, Gln, Ser, Thr, Val, Trp or Tyr; the amino acid at position 558 is Ala, Cys, Asp, Phe, Gly, His, Ile, Lys, Leu, Asn, Pro, Gln, Arg, Ser, Val, Trp or Tyr; the amino acid at position 559 is Lys, Ala, Cys, Phe, Gly, His, Ile, Leu, Asn, Gln, Arg, Ser, Thr, Val or Tyr; the amino acid at position 560 is Cys, Ala, Phe, Gly, Ile, Met, Asn, Arg, Ser, Thr or Val; the amino acid at position 561 is Lys, Ala, Cys, Asp, Glu, Phe, Gly, His, Ile, Leu, Met, Asn, Arg, Ser, Thr, Val or Tyr; the amino acid at position 562 is Asn, Cys, Asp, Glu, Gly, His, Leu, Met, Arg, Ser, Thr, Val or Tyr; the amino acid at position 563 is Val, Ala, Cys, Asp, Phe, His, Ile, Leu, Met, Asn, Gln, Thr or Trp; the amino acid at position 564 is Ala, Cys, Gly, Met, Gln, Ser, Thr, Val, Trp or Tyr; the amino acid at position 571 is Ser, Thr or Cys; the amino acid at position 575 is Val, Leu, Ile, Asp or Glu; the amino acid at position 577 is Met, Leu, Val or Ile; the amino acid at position 579 is Glu, Asp, Asn or Gln; the amino acid at position 583 is Asp or Glu; the amino acid at position 589 is Met, Ile, Val or Leu; the amino acid at position 590 is Met, Ile, Val or Leu; the amino acid at position 593 is Met, Leu, Val or Ile; the amino acid at position 595 is Arg, Lys, Asn or Gln; the amino acid at position 596 is Ser or Thr; the amino acid at position 597 is Gln, Asn or His; the amino acid at position 607 is Ala, Gly, Ile, Leu or Val; the amino acid at position 608 is Asp, Glu, Gln or Asn; the amino acid at position 612 is Tyr, His or Phe; the amino acid at position 617 is Thr, Ser, Leu, Val or Ile; the amino acid at position 618 is Gln, Asn or His; the amino acid at position 625 is Arg, Lys, Thr or Ser; the amino acid at position 626 is Met, Leu, Val or Ile; the amino acid at position 628 is Leu, Val or Ile; the amino acid at position 633 is Ile, Leu, Val or Met; the amino acid at position 634 is Leu, Ile, Val or Met; the amino acid at position 642 is Arg, Lys or Met; the amino acid at position 646 is Leu, Ala, Cys, Gly, Ile, Met, Asn, Gln, Ser, Thr or Val; the amino acid at position 647 is Leu, Asp, Gly, Met, Asn, Gln or Thr; the amino acid at position 648 is Met, Ala, Cys, Asp, Glu, Phe, Gly, His, Lys, Leu, Asn, Pro, Gln, Arg, Ser, Thr, Val, Trp or Tyr; the amino acid at position 649 is Pro, Ala, Cys, Asp, Glu, Phe, Gly, His, Lys, Met, Asn, Gln, Arg, Ser, Thr, Trp or Tyr; the amino acid at position 650 is Thr, Ala, Cys, Asp, Phe, Gly, His, Ile, Lys, Leu, Met, Pro, Gln, Arg, Ser, Val or Tyr; the amino acid at position 651 is Glu, Ala, Cys, Asp, Gly, His, Ile, Leu, Met, Asn, Pro, Gln, Arg, Ser, Thr, Val or Tyr; the amino acid at position 652 is Leu, Cys, Phe, Ile, Lys, Met, Pro, Arg, Ser, Thr or Val; the amino acid at position 653 is Thr, Cys, Asp, Glu, Phe, Gly, His, Ile, Lys, Leu, Pro, Arg, Ser, Val or Trp; the amino acid at position 654 is Thr, Ala, Cys, Phe, Ile, Lys, Leu, Met, Pro, Arg, Ser, Val, Trp or Tyr; the amino acid at position 655 is Trp, Phe or Tyr; the amino acid at position 658 is Gly, Lys, Ala or Arg; the amino acid at position 663 is Gly or Ala; the amino acid at position 664 is Asp, Glu, Gln or Asn; the amino acid at position 668 is Ala, Gly, Ser or Thr; the amino acid at position 669 is Gln, Asn or His; the amino acid at position 671 is Asn, Gln, Thr or Ser the amino acid at position 675 is Ile, Val, Ile, Thr or Ser; the amino acid at position 678 is Met, Ile, Ala, Leu, Ser or Thr; the amino acid at position 682 is Pro, Asn or Gln; the amino acid at position 683 is Ser, Thr or Pro; the amino acid at position 685 is Asp, Glu, Asp or Asn; the amino acid at position 694 is Asp, Glu, Ala or Gly; the amino acid at position 697 is Asn, Gln, Thr or Ser; the amino acid at position 704 is Glu, Asp, Ala or Gly; the amino acid at position 714 is Ala or Gly; the amino acid at position 721 is Ser, Thr or Phe; the amino acid at position 722 is Ser, Thr, Gln or Asn; the amino acid at position 724 is Ser or Thr; the amino acid at position 734 is His, Asn or Gln; the amino acid at position 736 is Val, Leu, Ile or Ala; the amino acid at position 737 is Lys, Arg, Asn or Gln; the amino acid at position 739 is Ala, Gly, Thr or Ser; the amino acid at position 740 is Ser, Thr or Met; the amino acid at position 741 is Gly, Ala, Gln or Asn; the amino acid at position 742 is Ile, Leu, Val, Ala or Gly; the amino acid at position 743 is Gly or deleted; the amino acid at position 745 is Gly, Ala, Glu or Asp; the amino acid at position 751 is Thr, Ser, Gly or Ala; the amino acid at position 753 is Gln, Asn, Lys or Arg; the amino acid at position 754 is Thr or Ser; the amino acid at position 756 is Thr, Ser, Leu, Val or Ile; the amino acid at position 757 is Val, Leu or Ile; the amino acid at position 766 is Ile, Leu or Val; the amino acid at position 771 is Arg, Ala, Asp, Glu, Phe, Gly, His, Ile, Lys, Leu, Asn, Ser, Thr, Val, Trp or Tyr; the amino acid at position 772 is Arg, Ala, Cys, Asp, Glu, Phe, Gly, His, Ile, Lys, Leu, Met, Pro, Gln, Ser, Thr, Val, Trp or Tyr; the amino acid at position 773 is Asp, Ala, Glu, Phe, Gly, His, Ile, Lys, Leu, Met, Asn, Gln, Arg, Ser, Thr, Val, Trp or Tyr; the amino acid at position 774 is Gln, Ala, Asp, Gly, His, Ile, Lys, Leu, Met, Asn, Pro, Arg, Ser, Thr, Val, Trp or Tyr; the amino acid at position 775 is Val, Ala, Cys, Asp, Glu, Gly, His, Ile, Asn, Pro, Gln, Arg, Ser, Thr or Tyr; the amino acid at position 776 is Leu, Ala, Cys, Asp, Glu, Phe, Gly, His, Ile, Lys, Asn, Pro, Gln, Arg, Ser, Thr, Val or Tyr; the amino acid at position 777 is Pro, Ala, Cys, Asp, Glu, Phe, Gly, His, Lys, Leu, Met, Asn, Gln, Ser, Thr, Val, Trp or Tyr; the amino acid at position 778 is Phe, Ala, His, Ile, Leu, Met, Asn, Gln, Ser, Val, Trp or Tyr; the amino acid at position 779 is Gln, Ala, Cys, Asp, Glu, Gly, His, Lys, Leu, Asn, Pro, Arg, Ser, Thr or Val; the amino acid at position 780 is Ala, Cys, Asn, Pro, Gln or Ser; the amino acid at position 781 is Ala, Cys, Asp, Glu, Phe, Gly, His, Ile, Asn, Gln, Arg, Ser, Thr, Val, Trp or Tyr; the amino acid at position 782 is Ala, Cys, Asp, Glu, Phe, Gly, His, Ile, Lys, Met, Pro, Gln, Arg, Ser, Thr, Val, Trp or Tyr; the amino acid at position 783 is Pro, Ala, Cys, Asp, Glu, Gly, His, Asn, Gln, Arg, Ser, Thr or Val; the amino acid at position 784 is Leu, Ala, Glu, Phe, His, Ile, Lys, Met, Asn, Pro, Gln, Ser, Thr, Val or Trp; the amino acid at position 785 is Asn, Ala, Cys, Glu, Phe, Gly, His, Ile, Lys, Leu, Met, Gln, Arg, Ser, Thr, Val, Trp or Tyr; the amino acid at position 786 is Tyr, Phe, Ile, Leu or Trp; the amino acid at position 787 is His, Asn or Gln; the amino acid at position 788 is Tyr or Met; the amino acid at position 789 is Ala, Lys or Arg; the amino acid at position 790 is Tyr or Thr; the amino acid at position 791 is Arg, Lys, Gly or Ala; the amino acid at position 792 is Leu, Ile, Val, Thr or Ser; the amino acid at position 796 is Asp or Glu; the amino acid at position 797 is Ser, Thr or Ala the amino acid at position 802 is Glu, Lys, Asp, Asn or Gln; the amino acid at position 806 is Gln, Asp, Glu, Asn or His; the amino acid at position 810 is Lys, Arg or Thr; the amino acid at position 819 is Arg, Lys or His; the amino acid at position 829 is Lys, Ser, Ala or Pro; the amino acid at position 832 is Ala, Lys, Arg, Asp or Glu; the amino acid at position 833 is Gly, Ala, Asp or Glu; the amino acid at position 842 is Leu, Ile, Val or Pro; the amino acid at position 847 is Gln, Asn, Asp or Glu; the amino acid at position 848 is Ile, Leu or Val; the amino acid at position 849 is Val, Leu, Ile, Gly or Ala; the amino acid at position 855 is Thr, Ser or Met; the amino acid at position 860 is Ile, Leu or Val; and the amino acid at position 864 is His, Asn or Gln.

[0045] In some embodiments the nucleic acid molecule encoding the PtIP-83 polypeptide is derived from a fern species in the Division Pteridophyta. The phylogeny of ferns as used herein is based on the classification for extant ferns by A. R. Smith et al, TAXON, 55:705-731 (2006). The consensus phylogeny based on the classification by A. R. Smith is shown in FIG. 1. Other phylogenic classifications of extant ferns are known to one skilled in the art. Additional information on the phylogeny of ferns can be found at mobot.org/MOBOT/research/APweb/(which can be accessed using the “www” prefix) and Schuettpelz E. and Pryer K. M., TAXON 56: 1037-1050 (2007) based on three plastid genes. Additional fern and other primitive plant species can be found at homepages.caverock.net.nz/˜bj/fern/list.htm (which can be accessed using the http:// prefix).

[0046] In some embodiments the nucleic acid molecule encoding the PtIP-83 polypeptide is derived from a fern species in the Class Psilotopsida. In some embodiments the nucleic acid molecule encoding the PtIP-83 polypeptide is derived from a fern species in the Class Psilotopsida, Order Psilotales. In some embodiments the the nucleic acid molecule encoding PtIP-83 polypeptide is derived from a fern species in the Class Psilotopsida, Order Ophioglossales. In some embodiments the nucleic acid molecule encoding the PtIP-83 polypeptide is derived from a fern species in the Class Psilotopsida, Order Ophioglossales, Family Psilotaceae. In some embodiments the nucleic acid molecule encoding the PtIP-83 polypeptide is derived from a fern species in the Class Psilotopsida, Order Ophioglossales Family Ophioglossaceae. In some embodiments the nucleic acid molecule encoding the PtIP-83 polypeptide is derived from a fern species in the Genus Ophioglossum L., Botrychium, Botrypus, Helminthostachys, Ophioderma, Cheiroglossa, Sceptridium or Mankyua.

[0047] In some embodiments the nucleic acid molecule encoding the PtIP-83 polypeptide is derived from a species in the Class Polypodiopsida/Pteridopsida. In some embodiments the nucleic acid molecule encoding the PtIP-83 polypeptide is derived from a fern species in the Order Osmundales (royal ferns); Family Osmundaceae. In some embodiments the nucleic acid molecule encoding the PtIP-83 polypeptide is derived from a fern species in the Order Hymenophyllales; Family Hymenophyllaceae. In some embodiments the nucleic acid molecule encoding the PtIP-83 polypeptide is derived from a fern species in the Order Gleicheniales; Family Gleicheniaceae, Family Dipteridaceae or Family Matoniaceae. In some embodiments the nucleic acid molecule encoding the PtIP-83 polypeptide is derived from a fern species in the Order Schizaeales; Family Lygodiaceae, Family Anemiaceae or Family Schizaeaceae. In some embodiments the nucleic acid encoding the PtIP-83 polypeptide is derived from a fern species in the Order Schizaeales; Family Schizaeaceae, Genus Lygodium selected from but not limited to Lygodium articulatum, Lygodium circinatum, Lygodium conforme, Lygodium cubense, Lygodium digitatum, Lygodium flexuosum, Lygodium heterodoxum, Lygodium japonicum, Lygodium kerstenii, Lygodium lanceolatum, Lygodium longifoiium, Lygodium mernilii, Lygodium micans, Lygodium microphyllum, Lygodium microstachyum, Lygodium oligostachyum, Lygodium palmatum, Lygodium polystachyum, Lygodium radiatum, Lygodium reticulatum, Lygodium salicifolium, Lygodium scandens, Lygodium smithianum, Lygodium subareolatum, Lygodium trifurcatum, Lygodium venustum, Lygodium versteeghii, Lygodium volubile, and Lygodium yunnanense. In some embodiments the nucleic acid molecule encoding the PtIP-83 polypeptide is derived from a fern species in the Order Salviniales; Family Marsileaceae or Family Salviniaceae. In some embodiments the nucleic acid molecule encoding the PtIP-83 polypeptide is derived from a fern species in the Order Cyatheales; Family Thyrsopteridaceae, Family Loxsomataceae, Family Culcitaceae, Family Plagiogyriaceae, Family Cibotiaceae, Family Cyatheaceae, Family Dicksoniaceae or Family Metaxyaceae.

[0048] In some embodiments the nucleic acid molecule encoding the PtIP-83 polypeptide is derived from a fern species in the Order Polypodiales; Family Lindsaeaceae, Family Saccolomataceae, Family Cystodiaceae, Family Dennstaedtiaceae, Family Pteridaceae, Family Aspleniaceae, Family Thelypteridaceae, Family Woodsiaceae, Family Onocleaceae, Family Blechnaceae, Family Dryopteridaceae, Family Lomariopsidaceae, Family Tectariaceae, Family Oleandraceae, Family Davalliaceae or Family Polypodiaceae.

[0049] In some embodiments the nucleic acid molecule encoding the PtIP-83 polypeptide is derived from a fern species in the Order Polypodiales, Family Pteridaceae, Genus Adiantaceae selected from but not limited to Adiantum aethiopicum, Adiantum aleuticum, Adiantum bonatianum, Adiantum cajennense, Adiantum capillus-junonis, Adiantum capillus-veneris, Adiantum caudatum, Adiantum chienii, Adiantum chilense, Adiantum cuneatum, Adiantum cunninghamii, Adiantum davidii, Adiantum diaphanum, Adiantum edentulum, Adiantum edgeworthii, Adiantum excisum, Adiantum fengianum, Adiantum fimbriatum, Adiantum flabellulatum, Adiantum formosanum, Adiantum formosum, Adiantum fulvum, Adiantum gravesii, Adiantum hispidulum, Adiantum induratum, Adiantum jordanii, Adiantum juxtapositum, Adiantum latifolium, Adiantum leveillei, Adiantum lianxianense, Adiantum malesianum, Adiantum mariesii, Adiantum monochlamys, Adiantum myriosorum, Adiantum obliquum, Adiantum ogasawarense, Adiantum pedatum, Adiantum pentadactylon, Adiantum peruvianum, Adiantum philippense, Adiantum princeps, Adiantum pubescens, Adiantum raddianum, Adiantum reniforme, Adiantum roborowskii, Adiantum serratodentatum, Adiantum sinicum, Adiantum soboliferum, Adiantum subcordatum, Adiantum tenerum, Adiantum terminatum, Adiantum tetraphyllum, Adiantum trapeziforme, Adiantum venustum, Adiantum viridescens, and Adiantum viridimontanum.

[0050] In some embodiments the nucleic acid molecule encoding the PtIP-83 polypeptide is derived from a fern species in the Order Polypodiales, Family Aspleniaceae, Genus Asplenium.

[0051] In some embodiments the nucleic acid molecule encoding the PtIP-83 polypeptide is derived from a fern species in the Order Polypodiales, Family Aspleniaceae, Genus Aspleniuml selected from but not limited to Asplenium adiantum, Asplenium adulterinum, Asplenium aequibasis, Asplenium aethiopicum, Asplenium africanum, Asplenium x alternifolium, Asplenium angustum, Asplenium antiquum, Asplenium ascensionis, Asplenium attenuatum, Asplenium aureum, Asplenium auritum, Asplenium australasicum, Asplenium azoricum, Asplenium bifrons, Asplenium billottii, Asplenium bipinnatifidum, Asplenium brachycarpum, Asplenium bradleyi, Asplenium bulbiferum, Asplenium caudatum, Asplenium ceterach, Asplenium cornpressum, Asplenium congestum, Asplenium corderoanum, Asplenium crinicaule, Asplenium cristatum, Asplenium cuneifolium, Asplenium cymbifolium, Asplenium daghestanicum, Asplenium dalhousiae, Asplenium dareoides, Asplenium daucifolium, Asplenium difforme, Asplenium fissum, Asplenium dimorphum, Asplenium divaricatum, Asplenium dregeanum, Asplenium x ebenoides, Asplenium ecuadorense, Asplenium feei Kunze, Asplenium fissum, Asplenium flabellifolium, Asplenium flaccidum, Asplenium fontanum, Asplenium forisiense, Asplenium formosum, Asplenium gemmiferum, Asplenium x germanicum, Asplenium gueinzii, Asplenium goudeyi, Asplenium hemionitis, Asplenium hermannii-christii, Asplenium hookerianum, Asplenium hybridum, Asplenium incisum, Asplenium x jacksonii, Asplenium x kenzoi, Asplenium laciniatum, Asplenium lamprophyllum, Asplenium laserpitiifolium, Asplenium lepidum, Asplenium listeri, Asplenium longissimum, Asplenium lucidum, Asplenium lunulatum, Asplenium lyallii, Asplenium macedonicum, Asplenium majoricum, Asplenium marinum, Asplenium x microdon, Asplenium milnei, Asplenium montanum, Asplenium musifolium, Asplenium nidus, Asplenium normale, Asplenium obliquum, Asplenium oblongifolium, Asplenium obovatum, Asplenium obtusatum, Asplenium oligolepidum, Asplenium oligophlebium, Asplenium onopteris, Asplenium pacificum, Asplenium paleaceum, Asplenium palmeri, Asplenium petrarchae, Asplenium pinnatifidum, Asplenium planicaule, Asplenium platybasis, Asplenium platyneuron, Asplenium polyodon, Asplenium praemorsum, Asplenium prolongatum, Asplenium pteridoides, Asplenium resiliens, Asplenium rhizophyllum, Asplenium richardii, Asplenium ruprechtii, Asplenium ruta-muraria, Asplenium rustifolium, Asplenium sagittatum, Asplenium sandersonii, Asplenium x sarniense, Asplenium schizotrichum, Asplenium schweinfurthii, Asplenium scleroprium, Asplenium scolopendrium (syn. Phyllitis scolopendrium), Asplenium seelosii, Asplenium septentrionale, Asplenium septentrionale x trichomanes, Asplenium serra, Asplenium serratum, Asplenium sessilifolium, Asplenium shuttleworthianum, Asplenium simplicifrons, Asplenium splendens, Asplenium surrogatum, Asplenium tenerum, Asplenium terrestre, Asplenium theciferum, Asplenium thunbergii, Asplenium trichomanes, Asplenium tutwilerae, Asplenium vespertinum, Asplenium vieillardii, Asplenium virens, Asplenium viride, Asplenium vittiforme, and Asplenium viviparum.

[0052] In some embodiments the nucleic acid molecule encoding the PtIP-83 polypeptide is derived from a fern species in the Order Polypodiales, Family Blechnaceae, Genus Blecnum.

[0053] In some embodiments the nucleic acid molecule encoding the PtIP-83 polypeptide is derived from a fern species in the Order Polypodiales, Family Dryopteridaceae Genus Acrophorus, Genus Acrorumohra, Genus Anapausia, Genus Arachniodes, Genus Bolbitis, Genus Ctenitis, Genus Cyclodium, Genus Cyrtogonellum, Genus Cyrtomidictyum, Genus Cyrtomium, Genus Diacalpe, Genus Didymochlaena, Genus Dryopsis, Genus Dryopteris, Genus Elaphoglossum, Genus Hypodematium, Genus Lastreopsis, Genus Leptorumohra, Genus Leucostegia, Genus Lithostegia, Genus Lomagramma, Genus Maxonia, Genus Megalastrum, Genus Olfersia, Genus Peranema, Genus Phanerophlebia, Genus Phanerophlebiopsis, Genus Polybotrya, Genus Polystichopsis, Genus Polystichum, Genus Rumohra, Genus Sorolepidium, Genus Stigmatopteris or Genus Teratophyllum.

[0054] In some embodiments the nucleic acid molecule encoding the PtIP-83 polypeptide is derived from a fern species in the Order Polypodiales, Family Dryopteridaceae, Genus Polystichum. In some embodiments the nucleic acid molecule encoding the PtIP-83 polypeptide is derived from a fern species in the Order Polypodiales, Family Dryopteridaceae, Genus Polystichum selected from but not limited to Polystichum acanthophyllum, Polystichum acrostichoides, Polystichum aculeatum, Polystichum acutidens, Polystichum acutipinnulum, Polystichum alcicorne, Polystichum aleuticum, Polystichum andersonii, Polystichum atkinsonii, Polystichum australiense, Polystichum bakerianum, Polystichum biaristatum, Polystichum bomiense, Polystichum bonseyi, Polystichum brachypterum, Polystichum braunii, Polystichum brachypterum, Polystichum calderonense, Polystichum californicum, Polystichum capillipes, Polystichum castaneum, Polystichum chilense, Polystichum christii Ching, Polystichum chunii Ching, Polystichum craspedosorum, Polystichum cyclolobum, Polystichum cystostegia, Polystichum deltodon, Polystichum dielsii, Polystichum discretum, Polystichum drepanum, Polystichum dudleyi, Polystichum duthiei, Polystichum echinatum, Polystichum erosum, Polystichum excellens, Polystichum eximium, Polystichum falcatipinnum, Polystichum falcinellum, Polystichum fallax, Polystichum formosanum, Polystichum gongboense, Polystichum grandifrons, Polystichum gymnocarpium, Polystichum haleakalense, Polystichum hancockii, Polystichum hecatopteron, Polystichum herbaceum, Polystichum imbricans, Polystichum incongruum, Polystichum kruckebergii, Polystichum kwakiutlii, Polystichum lachenense, Polystichum lanceolatum, Polystichum lemmonii, Polystichum lentum, Polystichum lonchitis, Polystichum longidens, Polystichum longipaleatum, Polystichum longipes, Polystichum luctuosum, Polystichum macleae, Polystichum macrochlaenum, Polystichum makinoi, Polystichum martini, Polystichum mayebarae, Polystichum mediocre, Polystichum medogense, Polystichum microchlamys, Polystichum mohrioides, Polystichum mollissimum, Polystichum monticola, Polystichum moorei, Polystichum morii, Polystichum moupinense, Polystichum muricatum, Polystichum nakenense, Polystichum neolobatum, Polystichum nepalense, Polystichum ningshenense, Polystichum obliquum, Polystichum omeiense, Polystichum ordinatum, Polystichum orientalitibeticum, Polystichum paramoupinense, Polystichum parvipinnulum, Polystichum piceopaleaceum, Polystichum polyblepharum, Polystichum prescottianum, Polystichum prionolepis, Polystichum proliferum, Polystichum pseudocastaneum, Polystichum pseudomakinoi, Polystichum punctiferum, Polystichum pungens, Polystichum qamdoense, Polystichum retrosopaleaceum, Polystichum rhombiforme, Polystichum rhomboidea, Polystichum richardii, Polystichum rigens, Polystichum rotundilobum, Polystichum scopulinum, Polystichum semifertile, Polystichum setiferum, Polystichum setigerum, Polystichum shensiense, Polystichum silvaticum, Polystichum simplicipinnum, Polystichum sinense, Polystichum squarrosum, Polystichum stenophyllum, Polystichum stimulans, Polystichum submite, Polystichum tacticopterum, Polystichum thomsoni, Polystichum tibeticum, Polystichum transvaalense, Polystichum tripteron, Polystichum tsus-simense, Polystichum vestitum, Polystichum wattii, Polystichum whiteleggei, Polystichum xiphophyllum, Polystichum yadongense, and Polystichum yunnanense.

[0055] In some embodiments the nucleic acid molecule encoding the PtIP-83 polypeptide is derived from a fern species in the Order Polypodiales, Family Dryopteridaceae, Genus Rumohra. In some embodiments the nucleic acid molecule encoding the PtIP-83 polypeptide is derived from a fern species in the Order Polypodiales, Family Dryopteridaceae, Genus Rumohra selected from but not limited to Rumohra adiantiformis, Rumohra aristata, Rumohra bartonae, Rumohra berteroana, Rumohra capuronii, Rumohra glandulosa, Rumohra humbertii, Rumohra linearisquamosa, Rumohra lokohensis, Rumohra madagascarica, and Rumohra quadrangularis.

[0056] In some embodiments the nucleic acid molecule encoding the PtIP-83 polypeptide is derived from a fern species in the Order Polypodiales, Family Polypodiaceae Genus Campyloneurum, Genus Drynaria, Genus Lepisorus, Genus Microgramma, Genus Microsorum, Genus Neurodium, Genus Niphidium, Genus Pecluma M.G., Genus Phlebodium, Genus Phymatosorus, Genus Platycerium, Genus Pleopeltis, Genus Polypodium.

[0057] In some embodiments the PtIP-83 polypeptide is derived from a fern species in the Order Polypodiales, Family Polypodiaceae, Genus Microsorum.

[0058] In some embodiments the nucleic acid molecule encoding the PtIP-83 polypeptide is derived from a fern species in the Order Polypodiales, Family Polypodiaceae, Genus Microsorum, selected from but not limited to Microsorum alatum, Microsorum angustifolium, Microsorum aurantiacum, Microsorum australiense, Microsorum baithoense, Microsorum basicordatum, Microsorum biseriatum, Microsorum brassii, Microsorum buergerianum, Microsorum chapaense, Microsorum cinctum, Microsorum commutatum, Microsorum congregatifolium, Microsorum cuneatum, Microsorum cuspidatum, Microsorum dengii, Microsorum egregium, Microsorum emeiensis, Microsorum ensatum, Microsorum ensiforme, Microsorum excelsum, Microsorum fortunei, Microsorum griseorhizoma, Microsorum grossum, Microsorum hemionitideum, Microsorum henryi, Microsorum heterocarpum, Microsorum heterolobum, Microsorum howense, Microsorum insigne, Microsorum intermedium, Microsorum kongtingense, Microsorum krayanense, Microsorum lanceolatum, Microsorum lancifolium, Microsorum lastii, Microsorum latilobatum, Microsorum leandrianum, Microsorum lineare, Microsorum linguiforme, Microsorum longissimum, Microsorum longshengense, Microsorum maculosum, Microsorum maximum, Microsorum membranaceum, Microsorum membranifolium, Microsorum microsorioides, Microsorum minor, Microsorum monstrosum, Microsorum muliense, Microsorum mutense, Microsorum nanchuanense, Microsorum ningpoense, Microsorum normale, Microsorum novae-zealandiae, Microsorum ovalifolium, Microsorum ovatum, Microsorum palmatopedatum, Microsorum pappei, Microsorum papuanum, Microsorum parksii, Microsorum pentaphyllum, Microsorum piliferum, Microsorum pitcairnense, Microsorum powellii, Microsorum pteropodum, Microsorum pteropus, Microsorum punctatum, Microsorum pustulatum, Microsorum rampans, Microsorum revolutum, Microsorum rubidum, Microsorum samarense, Microsorum sapaense, Microsorum sarawakense, Microsorum scandens, Microsorum scolopendria, Microsorum sibomense, Microsorum sinense, Microsorum sopuense, Microsorum spectrum, Microsorum steerei, Microsorum subhemionitideum, Microsorum submarginale, Microsorum subnudum, Microsorum superficiale, Microsorum takhtajanii, Microsorum tenuipes, Microsorum tibeticum, Microsorum triglossum, Microsorum truncatum, Microsorum tsaii, Microsorum varians, Microsorum venosum, Microsorum vieillardii, Microsorum x inaequibasis, Microsorum yiliangensis, and Microsorum zippelii.

[0059] In some embodiments the nucleic acid molecule encoding the PtIP-83 polypeptide is derived from a fern species in the Order Polypodiales, Family Polypodiaceae, Genus Polypodium L. In some embodiments the nucleic acid molecule encoding the PtIP-83 polypeptide is derived from a fern species in the Order Polypodiales, Family Polypodiaceae, Genus Polypodium L. selected from but not limited to Polypodium absidatum, Polypodium acutifolium, Polypodium adiantiforme, Polypodium aequale, Polypodium affine, Polypodium albidopaleatum, Polypodium alcicorne, Polypodium alfarii, Polypodium alfredii, Polypodium alfredii var. curtii, Polypodium allosuroides, Polypodium alsophilicola, Polypodium amamianum, Polypodium amoenum, Polypodium amorphum, Polypodium anetioides, Polypodium anfractuosum, Polypodium anguinum, Polypodium angustifolium f. remotifolia, Polypodium angustifolium var. amphostenon, Polypodium angustifolium var. heterolepis, Polypodium angustifolium var. monstrosa, Polypodium angustipaleatum, Polypodium angustissimum, Polypodium anisomeron var. pectinatum, Polypodium antioquianum, Polypodium aoristisorum, Polypodium apagolepis, Polypodium apicidens, Polypodium apiculatum, Polypodium apoense, Polypodium appalachianum, Polypodium appressum, Polypodium arenarium, Polypodium argentinum, Polypodium argutum, Polypodium armatum, Polypodium aromaticum, Polypodium aspersum, Polypodium assurgens, Polypodium atrum, Polypodium auriculatum, Polypodium balaonense, Polypodium balliviani, Polypodium bamleri, Polypodium bangii, Polypodium bartlettii, Polypodium basale, Polypodium bernoullii, Polypodium biauritum, Polypodium bifrons, Polypodium blepharodes, Polypodium bolivari, Polypodium bolivianum, Polypodium bolobense, Polypodium bombycinum, Polypodium bombycinum var. insularum, Polypodium bradeorum, Polypodium bryophilum, Polypodium bryopodum, Polypodium buchtienii, Polypodium buesii, Polypodium bulbotrichum, Polypodium caceresii, Polypodium californicum f. brauscombii, Polypodium californicum f. parsonsiae, Polypodium californicum, Polypodium calophiebium, Polypodium calvum, Polypodium camptophyllarium var. abbreviatum, Polypodium capitellatum, Polypodium carpinterae, Polypodium chachapoyense, Polypodium chartaceum, Polypodium chimantense, Polypodium chiricanum, Polypodium choquetangense, Polypodium christensenii, Polypodium christii, Polypodium chrysotrichum, Polypodium ciliolepis, Polypodium cinerascens, Polypodium collinsii, Polypodium colysoides, Polypodium confluens, Polypodium conforme, Polypodium confusum, Polypodium congregatifolium, Polypodium connellii, Polypodium consimile var. bourgaeanum, Polypodium consimile var. minor, Polypodium conterminans, Polypodium contiguum, Polypodium cookii, Polypodium coriaceum, Polypodium coronans, Polypodium costaricense, Polypodium costatum, Polypodium crassifolium f. angustissimum, Polypodium crassifolium var. longipes, Polypodium crassulum, Polypodium craterisorum, Polypodium cryptum, Polypodium crystalloneuron, Polypodium cucullatum var. planum, Polypodium cuencanum, Polypodium cumingianum, Polypodium cupreolepis, Polypodium curranii, Polypodium curvans, Polypodium cyathicola, Polypodium cyathisorum, Polypodium cyclocolpon, Polypodium daguense, Polypodium damunense, Polypodium dareiformioides, Polypodium dasypleura, Polypodium decipiens, Polypodium decorum, Polypodium delicatulum, Polypodium deltoideum, Polypodium demeraranum, Polypodium denticulatum, Polypodium diaphanum, Polypodium dilatatum, Polypodium dispersum, Polypodium dissectum, Polypodium dissimulans, Polypodium dolichosorum, Polypodium dolorense, Polypodium donnell-smithii, Polypodium drymoglossoides, Polypodium ebeninum, Polypodium eggersii, Polypodium elmeri, Polypodium elongatum, Polypodium enterosoroides, Polypodium erubescens, Polypodium erythrolepis, Polypodium erythrotrichum, Polypodium eurybasis, Polypodium eurybasis var. villosum, Polypodium exornans, Polypodium falcoideum, Polypodium fallacissimum, Polypodium farinosum, Polypodium faucium, Polypodium feei, Polypodium ferrugineum, Polypodium feuillei, Polypodium firmulum, Polypodium firmum, Polypodium flaccidum, Polypodium flagellare, Polypodium flexuosum, Polypodium flexuosum var. ekmanii, Polypodium forbesii, Polypodium formosanum, Polypodium fraxinifolium subsp. articulatum, Polypodium fraxinifolium subsp. luridum, Polypodium fructuosum, Polypodium fucoides, Polypodium fulvescens, Polypodium galeottii, Polypodium glaucum, Polypodium glycyrrhiza, Polypodium gracillimum, Polypodium gramineum, Polypodium grandifolium, Polypodium gratum, Polypodium graveolens, Polypodium griseo-nigrum, Polypodium griseum, Polypodium guttatum, Polypodium haalilioanum, Polypodium hammatisorum, Polypodium hancockii, Polypodium haplophlebicum, Polypodium harrisii, Polypodium hastatum var. simplex, Polypodium hawaiiense, Polypodium heanophyllum, Polypodium helleri, Polypodium hemionitidium, Polypodium henryi, Polypodium herzogii, Polypodium hesperium, Polypodium hessii, Polypodium hombersleyi, Polypodium hostmannii, Polypodium humile, Polypodium hyalinum, Polypodium iboense, Polypodium induens var. subdentatum, Polypodium insidiosum, Polypodium insigne, Polypodium intermedium subsp. masafueranum var. obtuseserratum, Polypodium intramarginale, Polypodium involutum, Polypodium itatiayense, Polypodium javanicum, Polypodium juglandifolium, Polypodium kaniense, Polypodium knowltoniorum, Polypodium kyimbilense, Polypodium l'herminieri var. costaricense, Polypodium lachniferum f. incurvata, Polypodium lachniferum var. glabrescens, Polypodium lachnopus, Polypodium lanceolatum var. complanatum, Polypodium lanceolatum var. trichophorum, Polypodium latevagans, Polypodium laxifrons, Polypodium laxifrons var. lividum, Polypodium lehmannianum, Polypodium leiorhizum, Polypodium leptopodon, Polypodium leuconeuron var. angustifolia, Polypodium leuconeuron var. latifolium, Polypodium leucosticta, Polypodium limulum, Polypodium lindigii, Polypodium lineatum, Polypodium lomarioides, Polypodium longifrons, Polypodium loretense, Polypodium loriceum var. umbraticum, Polypodium loriforme, Polypodium loxogramme f. gigas, Polypodium ludens, Polypodium luzonicum, Polypodium lycopodioides f. obtusum, Polypodium lycopodioides L., Polypodium macrolepis, Polypodium macrophyllum, Polypodium macrosorum, Polypodium macrosphaerum, Polypodium maculosum, Polypodium madrense, Polypodium manmeiense, Polypodium margaritiferum, Polypodium maritimum, Polypodium martensii, Polypodium mayoris, Polypodium megalolepis, Polypodium melanotrichum, Polypodium menisciifolium var. pubescens, Polypodium meniscioides, Polypodium merrillii, Polypodium mettenii, Polypodium mexiae, Polypodium microsorum, Polypodium militare, Polypodium minimum, Polypodium minusculum, Polypodium mixtum, Polypodium mollendense, Polypodium mollissimum, Polypodium moniliforme var. minus, Polypodium monoides, Polypodium monticola, Polypodium montigenum, Polypodium moritzianum, Polypodium moultonii, Polypodium multicaudatum, Polypodium multilineatum, Polypodium multisorum, Polypodium munchii, Polypodium muscoides, Polypodium myriolepis, Polypodium myriophyllum, Polypodium myriotrichum, Polypodium nematorhizon, Polypodium nemorale, Polypodium nesioticum, Polypodium nigrescentium, Polypodium nigripes, Polypodium nigrocinctum, Polypodium nimbatum, Polypodium nitidissimum, Polypodium nitidissimum var. latior, Polypodium nubrigenum, Polypodium oligolepis, Polypodium oligosorum, Polypodium oligosorum, Polypodium olivaceum, Polypodium olivaceum var. elatum, Polypodium oodes, Polypodium oosphaerum, Polypodium oreophilum, Polypodium ornatissimum, Polypodium ornatum, Polypodium ovatum, Polypodium oxylobum, Polypodium oxypholis, Polypodium pakkaense, Polypodium pallidum, Polypodium palmatopedatum, Polypodium palmeri, Polypodium panamense, Polypodium parvum, Polypodium patagonicum, Polypodium paucisorum, Polypodium pavonianum, Polypodium pectinatum var. caliense, Polypodium pectinatum var. hispidum, Polypodium pellucidum, Polypodium pendulum var. boliviense, Polypodium percrassum, Polypodium perpusillum, Polypodium peruvianum var. subgibbosum, Polypodium phyllitidis var. elongatum, Polypodium pichinchense, Polypodium pilosissimum, Polypodium pilosissimum var. glabriusculum, Polypodium pilossimum var. tunguraquensis, Polypodium pityrolepis, Polypodium platyphyllum, Polypodium playfairii, Polypodium plebeium var. cooperi, Polypodium plectolepidioides, Polypodium pleolepis, Polypodium plesiosorum var. i, Polypodium podobasis, Polypodium podocarpum, Polypodium poloense, Polypodium polydatylon, Polypodium polypodioides var. aciculare, Polypodium polypodioides var. michauxianum, Polypodium praetermissum, Polypodium preslianum var. immersum, Polypodium procerum, Polypodium procerum, Polypodium productum, Polypodium productum, Polypodium prolongilobum, Polypodium propinguum, Polypodium proteus, Polypodium pruinatum, Polypodium pseudocapillare, Polypodium pseudofratemum, Polypodium pseudonutans, Polypodium pseudoserratum, Polypodium pulcherrimum, Polypodium pulogense, Polypodium pungens, Polypodium purpusii, Polypodium radicale, Polypodium randallii, Polypodium ratiborii, Polypodium reclinatum, Polypodium recreense, Polypodium repens var. abruptum, Polypodium revolvens, Polypodium rhachipterygium, Polypodium rhomboideum, Polypodium rigens, Polypodium robustum, Polypodium roraimense, Polypodium roraimense, Polypodium rosei, Polypodium rosenstockii, Polypodium rubidum, Polypodium rudimentum, Polypodium rusbyi, Polypodium sablanianum, Polypodium sarmentosum, Polypodium saxicola, Polypodium schenckii, Polypodium schlechteri, Polypodium scolopendria, Polypodium scolopendria, Polypodium scolopendrium, Polypodium scouleri, Polypodium scutulatum, Polypodium segregatum, Polypodium semihirsutum, Polypodium semihirsutum var. fuscosetosum, Polypodium senile var. minor, Polypodium sericeolanatum, Polypodium serraeforme, Polypodium serricula, Polypodium sesquipedala, Polypodium sessilifolium, Polypodium setosum var. calvum, Polypodium setulosum, Polypodium shaferi, Polypodium sibomense, Polypodium siccum, Polypodium simacense, Polypodium simulans, Polypodium singeri, Polypodium sinicum, Polypodium sintenisii, Polypodium skutchii, Polypodium sloanei, Polypodium sodiroi, Polypodium sordidulum, Polypodium sordidum, Polypodium sphaeropteroides, Polypodium sphenodes, Polypodium sprucei, Polypodium sprucei var. furcativenosa, Polypodium steirolepis, Polypodium stenobasis, Polypodium stenolepis, Polypodium stenopterum, Polypodium subcapillare, Polypodium subflabelliforme, Polypodium subhemionitidium, Polypodium subinaequale, Polypodium subintegrum, Polypodium subspathulatum, Polypodium subtile, Polypodium subvestitum, Polypodium subviride, Polypodium superficiale var. attenuatum, Polypodium superficiale var. chinensis, Polypodium sursumcurrens, Polypodium tablazianum, Polypodium taenifolium, Polypodium tamandarei, Polypodium tatei, Polypodium tenuiculum var. acrosora, Polypodium tenuiculum var. brasiliense, Polypodium tenuilore, Polypodium tenuinerve, Polypodium tepuiense, Polypodium teresae, Polypodium tetragonum var. incompletum, Polypodium thysanolepis var. bipinnatifidum, Polypodium thyssanolepis, var. thyssanolepis, Polypodium thyssanolepsi, Polypodium tobagense, Polypodium trichophyllum, Polypodium tridactylum, Polypodium tridentatum, Polypodium trifurcatum var. brevipes, Polypodium triglossum, Polypodium truncatulum, Polypodium truncicola var. major, Polypodium truncicola var. minor, Polypodium tuberosum, Polypodium tunguraguae, Polypodium turquinum, Polypodium turrialbae, Polypodium ursipes, Polypodium vagans, Polypodium valdealatum, Polypodium versteegii, Polypodium villagranii, Polypodium virginianum f. cambroideum, Polypodium virginianum f. peraferens, Polypodium vittarioides, Polypodium vulgare, Polypodium vulgare L., Polypodium vulgare subsp. oreophilum, Polypodium vulgare var. acuminatum, Polypodium vulpinum, Polypodium williamsii, Polypodium wobbense, Polypodium x fallacissimum-guttatum, Polypodium xantholepis, Polypodium xiphopteris, Polypodium yarumalense, Polypodium yungense, and Polypodium zosteriforme.

[0060] In some embodiments the nucleic acid molecule encoding the PtIP-83 polypeptide is derived from a fern species in the Order Polypodiales, Family Polypodiaceae, Genus Platycerium.

[0061] In some embodiments the nucleic acid molecule encoding the PtIP-83 polypeptide is derived from a species in the Division Lycophyta. The phylogeny of extant Lycopods as used herein is based on the classification by N. Wikstrom, American Fern Journal, 91:150-156 (2001). Other phylogenic classifications of extant Lycopods are known to one skilled in the art. Additional information on the phylogeny of ferns can be found at mobot.org/MOBOT/research/APweb/ (which can be accessed using the “www” prefix) and Schuettpelz E. and Pryer K. M., TAXON 56: 1037-1050 (2007) based on three plastid genes. Additional Lycopod species can be found at homepages.caverock.net.nz/˜bj/fern/list.htm (which can be accessed using the http:// prefix).

[0062] In some embodiments the nucleic acid molecule encoding the PtIP-83 polypeptide is derived from a species in the Class Isoetopsida or Class Lycopodiopsida.

[0063] In some embodiments the nucleic acid molecule encoding the PtIP-83 polypeptide is derived from a species in the Class Isoetopsida, Order Selaginales. In some embodiments the nucleic acid molecule encoding the PtIP-83 polypeptide is derived from a fern species in the Class Isoetopsida, Order Selaginales, Family Selaginellaceae. In some embodiments the nucleic acid molecule encoding the PtIP-83 polypeptide is derived from a species in the Genus Selaginella.

[0064] In some embodiments the nucleic acid molecule encoding the PtIP-83 polypeptide is derived from a species in the Class Lycopodiopsida, Order Lycopodiales. In some embodiments the nucleic acid molecule encoding the PtIP-83 polypeptide is derived from a fern species in the Class Lycopodiopsida, Order Lycopodiales Family Lycopodiaceae or Family Huperziaceae. In some embodiments the nucleic acid molecule encoding the PtIP-83 polypeptide is derived from a species in the Genus Austrolycopodium, Dendrolycopodium, Diphasiastrum, Diphasium, Huperzia, Lateristachys, Lycopodiastrum, Lycopodiella, Lycopodium, Palhinhaea, Pseudodiphasium, Pseudolycopodiella, Pseudolycopodium or Spinulum. In some embodiments the nucleic acid molecule encoding the PtIP-83 polypeptide is derived from a species in the Genus Lycopodium.

[0065] In some embodiments the nucleic acid molecule encodes a PtIP-83 polypeptide comprises an amino acid sequence MOTIF selected from: an amino acid sequence MOTIF 1 as represented by an amino acid sequence of the formula MP[DE]MPSEADWSIFVNE[IV]EAVAEGMPTEVSEVP[AV]WKAKCKN[MV]AALGREM[SC]I (SEQ ID NO: 646); an amino acid sequence MOTIF 2 as represented by an amino acid sequence of the formula PQLQYRMYG[NS]LI[KN]QMAQVAQNYDQ[ED]FKQ[FL]KLFI[IA]QNQI[LF]GSYLLQQN[KR]A F (SEQ ID NO: 647); an amino acid sequence MOTIF 3 as represented by an amino acid sequence of the formula NTFMQMTPFTRWRLRLSASASENA[EG]LAFPTATA[PL]DSTT[EQ][IV]VITFHVTAIR (SEQ ID NO: 648); an amino acid sequence MOTIF 4 as represented by an amino acid sequence of the formula [DN]FTSRHVVK[GD]IPVSLLLDGEDWEFEIPVQ[AG]GMSSFP (SEQ ID NO: 649); an amino acid sequence MOTIF 5 as represented by an amino acid sequence of the formula IIHQP[SA]T[RQ][ST]G[IT]VYILLQGSTIFHDRRR[DE]EVMTFQAA[DA]PLN[FY][QH]YAYRLDT G (SEQ ID NO: 650); an amino acid sequence MOTIF 6 as represented by an amino acid sequence of the formula S[HQ]ADRLAAIQP[AV]DLTN[HY]LEMAT[HQ]MDMRTT[RS][MI]L[IL]GLLN[MI]LRIQNAALMY EY (SEQ ID NO: 651); an amino acid sequence MOTIF 7 as represented by an amino acid sequence of the formula [VL]DRVEFSEVMVIHRMYVRL[SA]DL[ND]VGEL[PE]GA[EG][RK]VKR[VL]YV[FL]ADVVE (SEQ ID NO: 652); an amino acid sequence MOTIF 8 as represented by an amino acid sequence of the formula A[DE]RELQMESFHSAVISQRRQEL[ND]TA[IF]AKM[DE]R[LM]SLQMEEE[NS]RAMEQAQKE M (SEQ ID NO: 653); an amino acid sequence MOTIF 9 as represented by an amino acid sequence of the formula FVTAGATAPGA[AV]ASAGQAVSIAGQAAQ[AG]LRRVVEILE[GQ]LEAVMEVVAA[VI]K (SEQ ID NO: 654); an amino acid sequence MOTIF 10 as represented by an amino acid sequence of the formula DGMNWG[IT]YI[YH]GE[KE]V[EQ]RSPLLPSNAILAVWADRC[TI]ITSARHNH[VF]NAPGR[IV]I (SEQ ID NO: 655); an amino acid sequence MOTIF 11 as represented by an amino acid sequence of the formula [KV][VK][CA]RPPSPDM[MV]SAVAEHALWLNDVLLQVVQ[KN]ESQ[LM]QGT[AE]PYNECLAL LGR (SEQ ID NO: 656); an amino acid sequence MOTIF 12 as represented by an amino acid sequence of the formula PTELT[VA]WPLGMDTV[AG]NLLIAQENAAL[VL]GLIQLGPSS (SEQ ID NO: 657); an amino acid sequence MOTIF 13 as represented by an amino acid sequence of the formula RDQ[MT][HQ]MPGSVTVI[IV]LCRLLQFP[IT]DGSQA[TA]T (SEQ ID NO: 658); an amino acid sequence MOTIF 14 as represented by an amino acid sequence of the formula TSIPVEVVTDP[SN]ILLGMQTTV[LH]IAEL (SEQ ID NO: 659); an amino acid sequence MOTIF 15 as represented by an amino acid sequence of the formula EGLR[EQ]FQNRQVARA[VL]FAVLKAVA[MQ]I[AG] (SEQ ID NO: 660); an amino acid sequence MOTIF 16 as represented by an amino acid sequence of the formula W[TS]RVRIRHLEM[QH]F[AV]QEASG (SEQ ID NO: 661); an amino acid sequence MOTIF 17 as represented by an amino acid sequence of the formula QISELQY[ED]IWVQG[LM][ML]RDIA (SEQ ID NO: 662); an amino acid sequence MOTIF 18 as represented by an amino acid sequence of the formula TFTLGSGVTGITSMHGEPSLDPWNGVSLDSASPTAF (SEQ ID NO: 663); an amino acid sequence MOTIF 19 as represented by an amino acid sequence of the formula MDYSTLYRDLNQIS (SEQ ID NO: 664); an amino acid sequence MOTIF 20 as represented by an amino acid sequence of the formula LRLPFM[QK]LHARVIEQN[VR]K[SE] (SEQ ID NO: 665); an amino acid sequence MOTIF 21 as represented by an amino acid sequence of the formula VDSLEQVG[QH][IL]V[GD]AP (SEQ ID NO: 666); an amino acid sequence MOTIF 22 as represented by an amino acid sequence of the formula [IV][EQ][CA]VMK[IM]GRF[VG][SL]VV (SEQ ID NO: 667); an amino acid sequence MOTIF 23 as represented by an amino acid sequence of the formula TLTNEPSE[EQ]F (SEQ ID NO: 668); and an amino acid sequence MOTIF 24 as represented by an amino acid sequence of the formula LPRQSRNISF (SEQ ID NO: 669).

[0066] In some embodiments the nucleic acid molecule encodes a PtIP-83 polypeptide comprises an amino acid sequence MOTIF selected from: an amino acid sequence MOTIF 1 having at least 90% sequence identity to the amino acid sequence as represented by the formula

[0067] MP[DE]MPSEADWSIFVNE[IV]EAVAEGMPTEVSEVP[AV]WKAKCKN[MV]AALGREM[SC]I (SEQ ID NO: 646); an amino acid sequence MOTIF 2 having at least 90% sequence identity to the amino acid sequence as represented by the formula PQLQYRMYG[NS]LI[KN]QMAQVAQNYDQ[ED]FKQ[FL]KLFI[IA]QNQI[LF]GSYLLQQN[KR]A F (SEQ ID NO: 647); an amino acid sequence MOTIF 3 having at least 90% sequence identity to the amino acid sequence as represented by the formula NTFMQMTPFTRWRLRLSASASENA[EG]LAFPTATA[PL]DSTT[EQ][IV]VITFHVTAIR (SEQ ID NO: 648); an amino acid sequence MOTIF 4 having at least 90% sequence identity to the amino acid sequence as represented by the formula [DN]FTSRHVVK[GD]IPVSLLLDGEDWEFEIPVQ[AG]GMSSFP (SEQ ID NO: 649); an amino acid sequence MOTIF 5 having at least 90% sequence identity to the amino acid sequence as represented by the formula IIHQP[SA]T[RQ][ST]G[IT]VYILLQGSTIFHDRRR[DE]EVMTFQAA[DA]PLN[FY][QH]YAYRLDT G (SEQ ID NO: 650); an amino acid sequence MOTIF 6 having at least 90% sequence identity to the amino acid sequence as represented by the formula S[HQ]ADRLAAIQP[AV]DLTN[HY]LEMAT[HQ]MDMRTT[RS][MI]L[IL]GLLN[MI]LRIQNAALMY EY (SEQ ID NO: 651); an amino acid sequence MOTIF 7 having at least 90% sequence identity to the amino acid sequence as represented by the formula [VL]DRVEFSEVMVIHRMYVRL[SA]DL[ND]VGEL[PE]GA[EG][RK]VKR[VL]YV[FL]ADVVE (SEQ ID NO: 652); an amino acid sequence MOTIF 8 having at least 90% sequence identity to the amino acid sequence as represented by the formula A[DE]RELQMESFHSAVISQRRQEL[ND]TA[IF]AKM[DE]R[LM]SLQMEEE[NS]RAMEQAQKE M (SEQ ID NO: 653); an amino acid sequence MOTIF 9 having at least 90% sequence identity to the amino acid sequence as represented by the formula FVTAGATAPGA[AV]ASAGQAVSIAGQAAQ[AG]LRRVVEILE[GQ]LEAVMEVVAA[VI]K (SEQ ID NO: 654); an amino acid sequence MOTIF 10 having at least 90% sequence identity to the amino acid sequence as represented by the formula DGMNWG[IT]YI[YH]GE[KE]V[EQ]RSPLLPSNAILAVWADRC[TI]ITSARHNH[VF]NAPGR[IV]I (SEQ ID NO: 655); an amino acid sequence MOTIF 11 having at least 90% sequence identity to the amino acid sequence as represented by the formula [KV][VK][CA]RPPSPDM[MV]SAVAEHALWLNDVLLQVVQ[KN]ESQ[LM]QGT[AE]PYNECLAL LGR (SEQ ID NO: 656); an amino acid sequence MOTIF 12 having at least 90% sequence identity to the amino acid sequence as represented by the formula PTELT[VA]WPLGMDTV[AG]NLLIAQENAAL[VL]GLIQLGPSS (SEQ ID NO: 657); an amino acid sequence MOTIF 13 having at least 90% sequence identity to the amino acid sequence as represented by the formula RDQ[MT][HQ]MPGSVTVI[IV]LCRLLQFP[IT]DGSQA[TA]T (SEQ ID NO: 658); an amino acid sequence MOTIF 14 having at least 90% sequence identity to the amino acid sequence as represented by the formula TSIPVEVVTDP[SN]ILLGMQTTV[LH]IAEL (SEQ ID NO: 659); an amino acid sequence MOTIF 15 having at least 90% sequence identity to the amino acid sequence as represented by the formula EGLR[EQ]FQNRQVARA[VL]FAVLKAVA[MQ]I[AG] (SEQ ID NO: 660); an amino acid sequence MOTIF 16 having at least 90% sequence identity to the amino acid sequence as represented by the formula W[TS]RVRIRHLEM[QH]F[AV]QEASG (SEQ ID NO: 661); an amino acid sequence MOTIF 17 having at least 90% sequence identity to the amino acid sequence as represented by the formula QISELQY[ED]IWVQG[LM][ML]RDIA (SEQ ID NO: 662); an amino acid sequence MOTIF 18 having at least 90% sequence identity to the amino acid sequence as represented by the formula TFTLGSGVTGITSMHGEPSLDPWNGVSLDSASPTAF (SEQ ID NO: 663); an amino acid sequence MOTIF 19 having at least 90% sequence identity to the amino acid sequence as represented by the formula MDYSTLYRDLNQIS (SEQ ID NO: 664); an amino acid sequence MOTIF 20 having at least 90% sequence identity to the amino acid sequence as represented by the formula LRLPFM[QK]LHARVIEQN[VR]K[SE] (SEQ ID NO: 665); an amino acid sequence MOTIF 21 having at least 90% sequence identity to the amino acid sequence as represented by the formula VDSLEQVG[QH][IL]V[GD]AP (SEQ ID NO: 666); an amino acid sequence MOTIF 22 having at least 90% sequence identity to the amino acid sequence as represented by the formula [IV][EQ][CA]VMK[IM]GRF[VG][SL]VV (SEQ ID NO: 667); an amino acid sequence MOTIF 23 having at least 90% sequence identity to the amino acid sequence as represented by the formula TLTNEPSE[EQ]F (SEQ ID NO: 668); and an amino acid sequence MOTIF 24 having at least 90% sequence identity to the amino acid sequence as represented by the formula LPRQSRNISF (SEQ ID NO: 669).

[0068] In some embodiments the nucleic acid molecule encodes a PtIP-83 polypeptide comprises an amino acid sequence MOTIF selected from: an amino acid sequence MOTIF 1 as represented by an amino acid sequence of the formula MP[DE]MP[ST][ED]ADWSIFVNE[IVL]EAVAEGMPTEVSEVP[AV]W[KR]AKCKN[MV]AALGRE M[SC]I (SEQ ID NO: 670); an amino acid sequence MOTIF 2 as represented by an amino acid sequence of the formula PQLQYRMYG[NS]LI[KRN]QMAQVAQNYD[QR][ED]FK[QR][FL][KR]LFI[IAVL]QNQI[LF]GSYL L[QE]QN[KR]AF (SEQ ID NO: 671); an amino acid sequence MOTIF 3 as represented by an amino acid sequence of the formula N[TK]FMQMTPFT[RH]WRLRLSASA[SPKA]EN[AK][EG]LAFPTATA[PL]DSTT[EQ][IV][VA]ITF HVTAIR (SEQ ID NO: 672); an amino acid sequence MOTIF 4 as represented by an amino acid sequence of the formula [DN]FTSRHVVK[GD]IPV[SN]LLLDG[EG]DWEFEIPVQ[AG]GMSSFP (SEQ ID NO: 673); an amino acid sequence MOTIF 5 as represented by an amino acid sequence of the formula IIHQP[SA]T[RQ][ST]G[IT][VI]YILLQGST[IV]FHDRRR[DE][EQ]V[ML]T[FP]QAA[DAV]PLN[FY][QH]YAYRLDTG (SEQ ID NO: 674); an amino acid sequence MOTIF 6 as represented by an amino acid sequence of the formula S[HQ]ADRLAAIQP[AV][DN]LTN[HYF]LEMAT[HQ]MDMRTT[RS][MI]L [IL]GLLN[MI][LM]RIQN AAL[MR]YEY (SEQ ID NO: 675); an amino acid sequence MOTIF 7 as represented by an amino acid sequence of the formula [VL]D[RQ]VEFSEVMVIHRMYV[N]RL[SA]DL[ND]V[GA][EQ]L[PE]GA[EG][RK]VKR[VL]YV[FL]ADVVE (SEQ ID NO: 676); an amino acid sequence MOTIF 8 as represented by an amino acid sequence of the formula A[DE]RELQMESFH[SA]AVISQ[RK]R[QGE]EL[ND][TD][AT][IF]AKM[DE]R[LM]SLQMEEE[NS D][RG]AMEQA[QR]KEM (SEQ ID NO: 677); an amino acid sequence MOTIF 9 as represented by an amino acid sequence of the formula F[VL]TAGATAPGA[AV]ASAGQAV[SN]IAGQAAQ[AG]LRRVVEILE[GQ]LEAVMEVVAA[VI]K (SEQ ID NO: 678); an amino acid sequence MOTIF 10 as represented by an amino acid sequence of the formula D[GD][MA][NK]WG[IT]Y[IV][YH][GA]E[KE]V[EQ][RVL]SPL[LYF][PN][SNG][NW][ASP][IY]L[AG V]V[WE]A[DQ]R[CS][TI]IT[SA]A[RFM]HN[HVT][VF][ND][AER]PG[RW][IV][IR] (SEQ ID NO: 679); an amino acid sequence MOTIF 11 as represented by an amino acid sequence of the formula [KV][VK][CA][RGC][PHY]PSP[DE][MIL][MV]SAV[AG][EV]HA[LIN]WL[NS][DK]VLL[QR]VVQ[K N]ES[QH][LM]QGT[AE][PSA]YNECLALLGR (SEQ ID NO: 680); an amino acid sequence MOTIF 12 as represented by an amino acid sequence of the formula [PN]T[EQ]LT[VAT]WPL[GR]MDTV[AG][ND]LLI[AT][QH]E[NS]AAL[VLS]GL[ITMA]QLG[PQ][S P]S (SEQ ID NO: 681); an amino acid sequence MOTIF 13 as represented by an amino acid sequence of the formula [RLC][DLWK][QNPR][MTP][HQR][MIL]PGSVTVI[IV]LCRLLQFP[IT][DG]G[SR][QFR][AS][TAD][TW] (SEQ ID NO: 682); an amino acid sequence MOTIF 14 as represented by an amino acid sequence of the formula [TA][SGV][IL]PV[ED]VVTDP[SN]IL[LM]GMQT[TS]V[LH]IAEL (SEQ ID NO: 683); an amino acid sequence MOTIF 15 as represented by an amino acid sequence of the formula EGLR[EQ]FQN[RE]QVA[RN]A[VL]FAVL[KS][AS]VA[MQ]I[AG] (SEQ ID NO: 684); an amino acid sequence MOTIF 16 as represented by an amino acid sequence of the formula W[TS]RVRIRHLEM[QH]F[AV][QK]E[AS][SM][GN] (SEQ ID NO: 685); an amino acid sequence MOTIF 17 as represented by an amino acid sequence of the formula Q[IM]S[EQ]LQY[ED]IWVQG[LM][ML]RD[IM]A (SEQ ID NO: 686); an amino acid sequence MOTIF 18 as represented by an amino acid sequence of the formula TFTLGSGVTGITSMHGEPSLDPWNGVSLDSASPTAF (SEQ ID NO: 663); an amino acid sequence MOTIF 19 as represented by an amino acid sequence of the formula [MLV]DY[SK][TSK]L[YF][RE]DLNQIS (SEQ ID NO: 687); an amino acid sequence MOTIF 20 as represented by an amino acid sequence of the formula L[RHQ]L[PT]FM[QK]LHA[RIT][VQL][IR]E[QER][NF][VR][KWS][SE] (SEQ ID NO: 688); an amino acid sequence MOTIF 21 as represented by an amino acid sequence of the formula V[DN][SA]L[ED]QV[GS][QH][IL]V[GD]AP (SEQ ID NO: 689); an amino acid sequence MOTIF 22 as represented by an amino acid sequence of the formula [IV][EQH][CAS][VA][MI]K[IM][GV][RP][FI][VG][SL]VV (SEQ ID NO: 690); an amino acid sequence MOTIF 23 as represented by an amino acid sequence of the formula TLTN[EQ]PSE[EQDH]F (SEQ ID NO: 691); and an amino acid sequence MOTIF 24 as represented by an amino acid sequence of the formula LP[RS]QS[RT]N[IV]SF (SEQ ID NO: 692).

[0069] In some embodiments the nucleic acid molecule encodes a PtIP-83 polypeptide comprises an amino acid sequence MOTIF selected from: an amino acid sequence MOTIF 1 having at least 90% sequence identity to the amino acid sequence as represented by the formula MP[DE]MP[ST][ED]ADWSIFVNE[IVL]EAVAEGMPTEVSEVP[AV]W[KR]AKCKN[MV]AALGRE M[SC]I (SEQ ID NO: 670); an amino acid sequence MOTIF 2 having at least 90% sequence identity to the amino acid sequence as represented by the formula PQLQYRMYG[NS]LI[KRN]QMAQVAQNYD[QR][ED]FK[QR][FL][KR]LFI[IAVL]QNQI[LF]GSYL L[QE]QN[KR]AF (SEQ ID NO: 671); an amino acid sequence MOTIF 3 having at least 90% sequence identity to the amino acid sequence as represented by the formula N[TK]FMQMTPFT[RH]WRLRLSASA[SPKA]EN[AK][EG]LAFPTATA[PL]DSTT[EQ][IV][VA]ITF HVTAIR (SEQ ID NO: 672); an amino acid sequence MOTIF 4 having at least 90% sequence identity to the amino acid sequence as represented by the formula [DN]FTSRHVVK[GD]IPV[SN]LLLDG[EG]DWEFEIPVQ[AG]GMSSFP (SEQ ID NO: 673); an amino acid sequence MOTIF 5 having at least 90% sequence identity to the amino acid sequence as represented by the formula IIHQP[SA]T[RQ][ST]G[IT][VI]YlLLQGST[IV]FHDRRR[DE][EQ]V[ML]T[FP]QAA[DAV]PLN[FY][QH]YAYRLDTG (SEQ ID NO: 674); an amino acid sequence MOTIF 6 having at least 90% sequence identity to the amino acid sequence as represented by the formula S[HQ]ADRLAAIQP[AV][DN]LTN[HYF]LEMAT[HQ]MDMRTT[RS][MI]L[IL]GLLN[MI][LM]RIQN AAL[MR]YEY (SEQ ID NO: 675); an amino acid sequence MOTIF 7 having at least 90% sequence identity to the amino acid sequence as represented by the formula [VL]D[RQ]VEFSEVMVIHRMYV[N]RL[SA]DL[ND]V[GA][EQ]L[PE]GA[EG][RK]VKR[VL]YV[FL]ADVVE (SEQ ID NO: 676); an amino acid sequence MOTIF 8 having at least 90% sequence identity to the amino acid sequence as represented by the formula A[DE]RELQMESFH[SA]AVISQ[RK]R[QGE]EL[ND][TD][AT][IF]AKM[DE]R[LM]SLQMEEE[NS D][RG]AMEQA[QR]KEM (SEQ ID NO: 677); an amino acid sequence MOTIF 9 having at least 90% sequence identity to the amino acid sequence as represented by the formula F[VL]TAGATAPGA[AV]ASAGQAV[SN]IAGQAAQ[AG]LRRVVEILE[GQ]LEAVMEVVAA[VI]K (SEQ ID NO: 678); an amino acid sequence MOTIF 10 having at least 90% sequence identity to the amino acid sequence as represented by the formula D[GD][MA][NK]WG[IT]Y[IV][YH][GA]E[KE]V[EQ][RVL]SPL[LYF][PN][SNG][NW][ASP][IY]L[AG V]V[WE]A[DQ]R[CS][TI]IT[SA]A[RFM]HN[HVT][VF][ND][AER]PG[RW][IV][IR] (SEQ ID NO: 679); an amino acid sequence MOTIF 11 having at least 90% sequence identity to the amino acid sequence as represented by the formula [KV][VK][CA][RGC][PHY]PSP[DE][MIL][MV]SAV[AG][EV]HA[LIN]WL[NS][DK]VLL[QR]VVQ[K N]ES[QH][LM]QGT[AE][PSA]YNECLALLGR (SEQ ID NO: 680); an amino acid sequence MOTIF 12 having at least 90% sequence identity to the amino acid sequence as represented by the formula [PN]T[EQ]LT[VAT]WPL[GR]MDTV[AG][ND]LLI[AT][QH]E[NS]AAL[VLS]GL[ITMA]QLG[PQ][S P]S (SEQ ID NO: 681); an amino acid sequence MOTIF 13 having at least 90% sequence identity to the amino acid sequence as represented by the formula [RLC][DLWK][QNPR][MTP][HQR][MIL]PGSVTVI[IV]LCRLLQFP[IT][DG]G[SR][QFR][AS][TAD][TW] (SEQ ID NO: 682); an amino acid sequence MOTIF 14 having at least 90% sequence identity to the amino acid sequence as represented by the formula [TA][SGV][IL]PV[ED]VVTDP[SN]IL[LM]GMQT[TS]V[LH]IAEL (SEQ ID NO: 683); an amino acid sequence MOTIF 15 having at least 90% sequence identity to the amino acid sequence as represented by the formula EGLR[EQ]FQN[RE]QVA[RN]A[VL]FAVL[KS][AS]VA[MQ]I[AG] (SEQ ID NO: 684); an amino acid sequence MOTIF 16 having at least 90% sequence identity to the amino acid sequence as represented by the formula W[TS]RVRIRHLEM[QH]F[AV][QK]E[AS][SM][GN] (SEQ ID NO: 685); an amino acid sequence MOTIF 17 having at least 90% sequence identity to the amino acid sequence as represented by the formula Q[IM]S[EQ]LQY[ED]IWVQG[LM][ML]RD[IM]A (SEQ ID NO: 686); an amino acid sequence MOTIF 18 having at least 90% sequence identity to the amino acid sequence as represented by the formula TFTLGSGVTGITSMHGEPSLDPWNGVSLDSASPTAF (SEQ ID NO: 663); an amino acid sequence MOTIF 19 having at least 90% sequence identity to the amino acid sequence as represented by the formula [MLV]DY[SK][TSK]L[YF][RE]DLNQIS (SEQ ID NO: 687); an amino acid sequence MOTIF 20 having at least 90% sequence identity to the amino acid sequence as represented by the formula L[RHQ]L[PT]FM[QK]LHA[RIT][VQL][IR]E[QER][NF][VR][KWS][SE] (SEQ ID NO: 688); an amino acid sequence MOTIF 21 having at least 90% sequence identity to the amino acid sequence as represented by the formula V[DN][SA]L[ED]QV[GS][QH][IL]V[GD]AP (SEQ ID NO: 689); an amino acid sequence MOTIF 22 having at least 90% sequence identity to the amino acid sequence as represented by the formula [IV][EQH][CAS][VA][MI]K[IM][GV][RP][FI][VG][SL]VV (SEQ ID NO: 690); an amino acid sequence MOTIF 23 having at least 90% sequence identity to the amino acid sequence as represented by the formula TLTN[EQ]PSE[EQDH]F (SEQ ID NO: 691); and an amino acid sequence MOTIF 24 having at least 90% sequence identity to the amino acid sequence as represented by the formula LP[RS]QS[RT]N[IV]SF (SEQ ID NO: 692).

[0070] In some embodiments the nucleic acid molecule encodes a PtIP-83 polypeptide comprises an amino acid sequence MOTIF selected from: an amino acid sequence MOTIF 1 as represented by an amino acid sequence of the formula MP[DE]MP[ST][ED]ADWSIFVNE[IVL]EAVAEGMPTEVSEVP[AVIL]W[KR]AKCKN[MVIL]AAL GREM[SCT]I (SEQ ID NO: 693); an amino acid sequence MOTIF 2 as represented by an amino acid sequence of the formula PQLQYRMYG[NS]LI[KRNQ]QMAQVAQNYD[QRNK][ED]FK[QRNK][FL][KR]LFI[IAVL]QNQI[L FIV]GSYLL[QEND]QN[KR]AF (SEQ ID NO: 694); an amino acid sequence MOTIF 3 as represented by an amino acid sequence of the formula N[TKSR]FMQMTPFT[RHK]WRLRLSASA[SPKATR]EN[AKR][EG]LAFPTATA[PLIV]DSTT[EQ ND][IVL][VAIL]ITFHVTAIR (SEQ ID NO: 695); an amino acid sequence MOTIF 4 as represented by an amino acid sequence of the formula [DNQE]FTSRHVVK[GDE]IPV[SNTQ]LLLDG[EGD]DWEFEIPVQ[AG]GMSSFP (SEQ ID NO: 696); an amino acid sequence MOTIF 5 as represented by an amino acid sequence of the formula IIHQP[SAT]T[RQKN][ST]G[ITLVS][VIL]YILLQGST[IVL]FHDRRR[DE][EQDN]V[MLIV]T[FP]QA A[DAVEIL]PLN[FY][QHN]YAYRLDTG (SEQ ID NO: 697); an amino acid sequence MOTIF 6 as represented by an amino acid sequence of the formula S[HQN]ADRLAAIQP[AVIL][DN]LTN[HYF]LEMAT[HQN]MDMRTT[RSKT][MILV]L[ILV]GLLN[M ILV][LMIV]RIQNAAL[MRILVK]YEY (SEQ ID NO: 698); an amino acid sequence MOTIF 7 as represented by an amino acid sequence of the formula [VLI]D[RQKN]VEFSEVMVIHRMYV[N]RL[SAT]DL[NDQE]V[GA][EQND]L[PED]GA[EGD][RK]VKR[VLI]YV[FLIV]ADVVE (SEQ ID NO: 699); an amino acid sequence MOTIF 8 as represented by an amino acid sequence of the formula A[DE]RELQMESFH[SAT]AVISQ[RK]R[QGEND]EL[NDQE][TDSE][ATS][IFLV]AKM[DE]R[LMI V]SLQMEEE[NSDQET][RGK]AMEQA[QRNK]KEM (SEQ ID NO: 700); an amino acid sequence MOTIF 9 as represented by an amino acid sequence of the formula F[VLI]TAGATAPGA[AVIL]ASAGQAV[SNTQ]IAGQAAQ[AG]LRRVVEILE[GQN]LEAVMEVVA A[VIL]K (SEQ ID NO: 701); an amino acid sequence MOTIF 10 as represented by an amino acid sequence of the formula D[GDE][MA][NKQK]WG[ITLVS]Y[IVL][YH][GA]E[KERD]V[EQND][RVLKI]SPL[LYFIV][PNQ][S NGTQ][NWQ][ASPT][IYLV]L[AGVIL]V[WED]A[DQNE]R[CST][TISLV]IT[SAT]A[RFMK]HN[HV TILS][VFIL][NDQE][AERDK]PG[RWK][IVL][IRLVK] (SEQ ID NO: 702); an amino acid sequence MOTIF 11 as represented by an amino acid sequence of the formula [KVRIL][VKRIL][CA][RGCK][PHY]PSP[DE][MILV][MVIL]SAV[AG][EVDIL]HA[LINVQ]WL[NSQ T][DKER]VLL[QRNK]VVQ[KNRQ]ES[QHN][LMIV]QGT[AED][PSAT]YNECLALLGR (SEQ ID NO: 703); an amino acid sequence MOTIF 12 as represented by an amino acid sequence of the formula [PNQ]T[EQDN]LT[VATILS]WPL[GRK]MDTV[AG][NDQE]LLI[ATS][QHN]E[NSQT]AAL[VLSIT]GL[ITMALVS]QLG[PQN][SPT]S (SEQ ID NO: 704); an amino acid sequence MOTIF 13 as represented by an amino acid sequence of the formula [RLCKIV][DLWKEIVR][QNPRK][MTP][HQR][MILV]PGSVTVI[IVL]LCRLLQFP[ITLVS][DGE]G[SRTK][QFRNK][AST][TADES][TWS] (SEQ ID NO: 705); an amino acid sequence MOTIF 14 as represented by an amino acid sequence of the formula [TA][SGVTIL][ILV]PV[ED]VVTDP[SNTQ]IL[LMIV]GMQT[TS]V[LHIV]IAEL (SEQ ID NO: 706); an amino acid sequence MOTIF 15 as represented by an amino acid sequence of the formula EGLR[EQND]FQN[REKD]QVA[RNKQ]A[VLI]FAVL[KSRT][AST]VA[MQN]I[AG] (SEQ ID NO: 707); an amino acid sequence MOTIF 16 as represented by an amino acid sequence of the formula W[TS]RVRIRHLEM[QHN]F[AVIL][QKNR]E[AST][SMT][GNQ] (SEQ ID NO: 708); an amino acid sequence MOTIF 17 as represented by an amino acid sequence of the formula Q[IMLV]S[EQND]LQY[ED]IWVQG[LMIV][MLIV]RD[IMLV]A (SEQ ID NO: 709); an amino acid sequence MOTIF 18 as represented by an amino acid sequence of the formula TFTLGSGVTGITSMHGEPSLDPWNGVSLDSASPTAF (SEQ ID NO: 663); an amino acid sequence MOTIF 19 as represented by an amino acid sequence of the formula [MLVI]DY[SKTR][TSKR]L[YF][REKD]DLNQIS (SEQ ID NO: 710); an amino acid sequence MOTIF 20 as represented by an amino acid sequence of the formula L[RHQKN]L[PTS]FM[QKNR]LHA[RITKLVS][VQLIN][IRLVK]E[QERNDK][NFQ][VRI LK][KWSR T][SETD] (SEQ ID NO: 711); an amino acid sequence MOTIF 21 as represented by an amino acid sequence of the formula V[DNQE][SAT]L[ED]QV[GST][QHN][ILV]V[GDE]AP (SEQ ID NO: 712); an amino acid sequence MOTIF 22 as represented by an amino acid sequence of the formula [IVL][EQHND][CAST][VAIL][MILV]K[IMLV][GVIL][RPK][FILV][VGIL][SLTIV]VV (SEQ ID NO: 713); an amino acid sequence MOTIF 23 as represented by an amino acid sequence of the formula TLTN[EQDN]PSE[EQDHN]F (SEQ ID NO: 714); and an amino acid sequence MOTIF 24 as represented by an amino acid sequence of the formula LP[RSKT]QS[RTKS]N[IVL]SF (SEQ ID NO: 715).

[0071] In some embodiments the nucleic acid molecule encodes a PtIP-83 polypeptide comprises an amino acid sequence MOTIF selected from: an amino acid sequence MOTIF 1 having at least 90% sequence identity to the amino acid sequence as represented by the formula MP[DE]MP[ST][ED]ADWSIFVNE[IVL]EAVAEGMPTEVSEVP[AVIL]W[KR]AKCKN[MVIL]AAL GREM[SCT]I (SEQ ID NO: 693); an amino acid sequence MOTIF 2 having at least 90% sequence identity to the amino acid sequence as represented by the formula PQLQYRMYG[NS]LI[KRNQ]QMAQVAQNYD[QRNK][ED]FK[QRNK][FL][KR]LFI[IAVL]QNQI[L FIV]GSYLL[QEND]QN[KR]AF (SEQ ID NO: 694); an amino acid sequence MOTIF 3 having at least 90% sequence identity to the amino acid sequence as represented by the formula N[TKSR]FMQMTPFT[RHK]WRLRLSASA[SPKATR]EN[AKR][EG]LAFPTATA[PLIV]DSTT[EQ ND][IVL][VAIL]ITFHVTAIR (SEQ ID NO: 695); an amino acid sequence MOTIF 4 having at least 90% sequence identity to the amino acid sequence as represented by the formula [DNQE]FTSRHVVK[GDE]IPV[SNTQ]LLLDG[EGD]DWEFEIPVQ[AG]GMSSFP (SEQ ID NO: 696); an amino acid sequence MOTIF 5 having at least 90% sequence identity to the amino acid sequence as represented by the formula IIHQP[SAT]T[RQKN][ST]G[ITLVS][VIL]YILLQGST[IVL]FHDRRR[DE][EQDN]V[MLIV]T[FP]QA A[DAVEIL]PLN[FY][QHN]YAYRLDTG (SEQ ID NO: 697); an amino acid sequence MOTIF 6 having at least 90% sequence identity to the amino acid sequence as represented by the formula S[HQN]ADRLAAIQP[AVIL][DN]LTN[HYF]LEMAT[HQN]MDMRTT[RSKT][MILV]L[ILV]GLLN[M ILV][LMIV]RIQNAAL[MRILVK]YEY (SEQ ID NO: 698); an amino acid sequence MOTIF 7 having at least 90% sequence identity to the amino acid sequence as represented by the formula [VLI]D[RQKN]VEFSEVMVIHRMYV[N]RL[SAT]DL[NDQE]V[GA][EQND]L[PED]GA[EGD][RK]VKR[VLI]YV[FLIV]ADVVE (SEQ ID NO: 699); an amino acid sequence MOTIF 8 having at least 90% sequence identity to the amino acid sequence as represented by the formula A[DE]RELQMESFH[SAT]AVISQ[RK]R[QGEND]EL[NDQE][TDSE][ATS][IFLV]AKM[DE]R[LMI V]SLQMEEE[NSDQET][RGK]AMEQA[QRNK]KEM (SEQ ID NO: 700); an amino acid sequence MOTIF 9 having at least 90% sequence identity to the amino acid sequence as represented by the formula F[VLI]TAGATAPGA[AVIL]ASAGQAV[SNTQ]IAGQAAQ[AG]LRRVVEILE[GQN]LEAVMEVVA A[VIL]K (SEQ ID NO: 701); an amino acid sequence MOTIF 10 having at least 90% sequence identity to the amino acid sequence as represented by the formula D[GDE][MA][NKQK]WG[ITLVS]Y[IVL][YH][GA]E[KERD]V[EQND][RVLKI]SPL[LYFIV][PNQ][S NGTQ][NWQ][ASPT][IYLV]L[AGVIL]V[WED]A[DQNE]R[CST][TISLV]IT[SAT]A[RFMK]HN[HV TILS][VFIL][NDQE][AERDK]PG[RWK][IVL][IRLVK] (SEQ ID NO: 702); an amino acid sequence MOTIF 11 having at least 90% sequence identity to the amino acid sequence as represented by the formula [KVRIL][VKRIL][CA][RGCK][PHY]PSP[DE][MILV][MVIL]SAV[AG][EVDIL]HA[LINVQ]WL[NSQ T][DKER]VLL[QRNK]VVQ[KNRQ]ES[QHN][LMIV]QGT[AED][PSAT]YNECLALLGR (SEQ ID NO: 703); an amino acid sequence MOTIF 12 having at least 90% sequence identity to the amino acid sequence as represented by the formula [PNQ]T[EQDN]LT[VATILS]WPL[GRK]MDTV[AG][NDQE]LLI[ATS][QHN]E[NSQT]AAL[VLSIT]GL[ITMALVS]QLG[PQN][SPT]S (SEQ ID NO: 704); an amino acid sequence MOTIF 13 having at least 90% sequence identity to the amino acid sequence as represented by the formula [RLCKIV][DLWKEIVR][QNPRK][MTP][HQR][MILV]PGSVTVI[IVL]LCRLLQFP[ITLVS][DGE]G[SRTK][QFRNK][AST][TADES][TWS] (SEQ ID NO: 705); an amino acid sequence MOTIF 14 having at least 90% sequence identity to the amino acid sequence as represented by the formula [TA][SGVTIL][ILV]PV[ED]VVTDP[SNTQ]IL[LMIV]GMQT[TS]V[LHIV]IAEL (SEQ ID NO: 706); an amino acid sequence MOTIF 15 having at least 90% sequence identity to the amino acid sequence as represented by the formula EGLR[EQND]FQN[REKD]QVA[RNKQ]A[VLI]FAVL[KSRT][AST]VA[MQN]I[AG] (SEQ ID NO: 707); an amino acid sequence MOTIF 16 having at least 90% sequence identity to the amino acid sequence as represented by the formula W[TS]RVRIRHLEM[QHN]F[AVIL][QKNR]E[AST][SMT][GNQ] (SEQ ID NO: 708); an amino acid sequence MOTIF 17 having at least 90% sequence identity to the amino acid sequence as represented by the formula Q[IMLV]S[EQND]LQY[ED]IWVQG[LMIV][MLIV]RD[IMLV]A (SEQ ID NO: 709); an amino acid sequence MOTIF 18 having at least 90% sequence identity to the amino acid sequence as represented by the formula TFTLGSGVTGITSMHGEPSLDPWNGVSLDSASPTAF (SEQ ID NO: 663); an amino acid sequence MOTIF 19 having at least 90% sequence identity to the amino acid sequence as represented by the formula [MLVI]DY[SKTR][TSKR]L[YF][REKD]DLNQIS (SEQ ID NO: 710); an amino acid sequence MOTIF 20 having at least 90% sequence identity to the amino acid sequence as represented by the formula L[RHQKN]L[PTS]FM[QKNR]LHA[RITKLVS][VQLIN][IRLVK]E[QERNDK][NFQ][VRILK][KWSR T][SETD] (SEQ ID NO: 711); an amino acid sequence MOTIF 21 having at least 90% sequence identity to the amino acid sequence as represented by the formula V[DNQE][SAT]L[ED]QV[GST][QHN][ILV]V[GDE]AP (SEQ ID NO: 712); an amino acid sequence MOTIF 22 having at least 90% sequence identity to the amino acid sequence as represented by the formula [IVL][EQHND][CAST][VAIL][MILV]K[IMLV][GVIL][RPK][FILV][VGIL][SLTIV]VV (SEQ ID NO: 713); an amino acid sequence MOTIF 23 having at least 90% sequence identity to the amino acid sequence as represented by the formula TLTN[EQDN]PSE[EQDHN]F (SEQ ID NO: 714); and an amino acid sequence MOTIF 24 having at least 90% sequence identity to the amino acid sequence as represented by the formula LP[RSKT]QS[RTKS]N[IVL]SF (SEQ ID NO: 715).

[0072] In some embodiments the nucleic acid molecule encodes a PtIP-83 polypeptide comprising, sequentially from the N-terminus to the C-terminus, an amino acid sequence MOTIF selected from: MOTIF 19 (SEQ ID NO: 664, SEQ ID NO: 687 or SEQ ID NO: 710), MOTIF 7 (SEQ ID NO: 652, SEQ ID NO: 676 or SEQ ID NO: 699), MOTIF 13 (SEQ ID NO: 658, SEQ ID NO: 682 or SEQ ID NO: 705), MOTIF 20 (SEQ ID NO: 665, SEQ ID NO: 688 or SEQ ID NO: 711), MOTIF 10 (SEQ ID NO: 655, SEQ ID NO: 679 or SEQ ID NO: 702), MOTIF 18 (SEQ ID NO: 663), MOTIF 24 (SEQ ID NO: 669, SEQ ID NO: 692 or SEQ ID NO: 715), MOTIF 14 (SEQ ID NO: 659, SEQ ID NO: 683 or SEQ ID NO: 706), MOTIF 11 (SEQ ID NO: 656, SEQ ID NO: 680 or SEQ ID NO: 703), MOTIF 22 (SEQ ID NO: 667, SEQ ID NO: 690 or SEQ ID NO: 713), MOTIF 2 (SEQ ID NO: 647, SEQ ID NO: 671 or SEQ ID NO: 694), MOTIF 8 (SEQ ID NO: 653, SEQ ID NO: 677 or SEQ ID NO: 700), MOTIF 15 (SEQ ID NO: 660, SEQ ID NO: 684 or SEQ ID NO: 707), MOTIF 9 (SEQ ID NO: 654, SEQ ID NO: 678 or SEQ ID NO: 701), MOTIF 21 (SEQ ID NO: 666, SEQ ID NO: 689 or SEQ ID NO: 712), MOTIF 1 (SEQ ID NO: 646, SEQ ID NO: 670 or SEQ ID NO: 693), MOTIF 17 (SEQ ID NO: 662, SEQ ID NO: 686 or SEQ ID NO: 709), MOTIF 6 (SEQ ID NO: 651, SEQ ID NO: 675 or SEQ ID NO: 698), MOTIF 12 (SEQ ID NO: 657, SEQ ID NO: 681 or SEQ ID NO: 704), MOTIF 4 (SEQ ID NO: 649, SEQ ID NO: 673 or SEQ ID NO: 696), MOTIF 16 (SEQ ID NO: 661, SEQ ID NO: 685 or SEQ ID NO: 708), MOTIF 5 (SEQ ID NO: 650, SEQ ID NO: 674 or SEQ ID NO: 697), MOTIF 23 (SEQ ID NO: 668, SEQ ID NO: 691 or SEQ ID NO: 714), and MOTIF 3 (SEQ ID NO: 648, SEQ ID NO: 672 or SEQ ID NO: 695).

[0073] In some embodiments the nucleic acid molecule encodes a PtIP-83 polypeptide comprising, sequentially from the N-terminus to the C-terminus, an amino acid sequence MOTIF selected from: MOTIF 19 (SEQ ID NO: 664, SEQ ID NO: 687 or SEQ ID NO: 710), MOTIF 7 (SEQ ID NO: 652, SEQ ID NO: 676 or SEQ ID NO: 699), MOTIF 13 (SEQ ID NO: 658, SEQ ID NO: 682 or SEQ ID NO: 705), MOTIF 20 (SEQ ID NO: 665, SEQ ID NO: 688 or SEQ ID NO: 711), MOTIF 14 (SEQ ID NO: 659, SEQ ID NO: 683 or SEQ ID NO: 706), MOTIF 2 (SEQ ID NO: 647, SEQ ID NO: 671 or SEQ ID NO: 694), MOTIF 8 (SEQ ID NO: 653, SEQ ID NO: 677 or SEQ ID NO: 700), MOTIF 15 (SEQ ID NO: 660, SEQ ID NO: 684 or SEQ ID NO: 707), MOTIF 9 (SEQ ID NO: 654, SEQ ID NO: 678 or SEQ ID NO: 701), MOTIF 21 (SEQ ID NO: 666, SEQ ID NO: 689 or SEQ ID NO: 712), MOTIF 1 (SEQ ID NO: 646, SEQ ID NO: 670 or SEQ ID NO: 693), MOTIF 17 (SEQ ID NO: 662, SEQ ID NO: 686 or SEQ ID NO: 709), MOTIF 6 (SEQ ID NO: 651, SEQ ID NO: 675 or SEQ ID NO: 698), MOTIF 12 (SEQ ID NO: 657, SEQ ID NO: 681 or SEQ ID NO: 704), MOTIF 4 (SEQ ID NO: 649, SEQ ID NO: 673 or SEQ ID NO: 696), MOTIF 16 (SEQ ID NO: 661, SEQ ID NO: 685 or SEQ ID NO: 708), MOTIF 5 (SEQ ID NO: 650, SEQ ID NO: 674 or SEQ ID NO: 697), MOTIF 23 (SEQ ID NO: 668, SEQ ID NO: 691 or SEQ ID NO: 714), and MOTIF 3 (SEQ ID NO: 648, SEQ ID NO: 672 or SEQ ID NO: 695).

[0074] In some embodiments the nucleic acid molecule encodes a PtIP-83 polypeptide comprising, sequentially from the N-terminus to the C-terminus, the amino acid sequence motifs: MOTIF 19 (SEQ ID NO: 664, SEQ ID NO: 687 or SEQ ID NO: 710), MOTIF 7 (SEQ ID NO: 652, SEQ ID NO: 676 or SEQ ID NO: 699), MOTIF 13 (SEQ ID NO: 658, SEQ ID NO: 682 or SEQ ID NO: 705), MOTIF 20 (SEQ ID NO: 665, SEQ ID NO: 688 or SEQ ID NO: 711), MOTIF 10 (SEQ ID NO: 655, SEQ ID NO: 679 or SEQ ID NO: 702), MOTIF 18 (SEQ ID NO: 663), MOTIF 24 (SEQ ID NO: 669, SEQ ID NO: 692 or SEQ ID NO: 715), MOTIF 14 (SEQ ID NO: 659, SEQ ID NO: 683 or SEQ ID NO: 706), MOTIF 11 (SEQ ID NO: 656, SEQ ID NO: 680 or SEQ ID NO: 703), MOTIF 22 (SEQ ID NO: 667, SEQ ID NO: 690 or SEQ ID NO: 713), MOTIF 2 (SEQ ID NO: 647, SEQ ID NO: 671 or SEQ ID NO: 694), MOTIF 8 (SEQ ID NO: 653, SEQ ID NO: 677 or SEQ ID NO: 700), MOTIF 15 (SEQ ID NO: 660, SEQ ID NO: 684 or SEQ ID NO: 707), MOTIF 9 (SEQ ID NO: 654, SEQ ID NO: 678 or SEQ ID NO: 701), MOTIF 21 (SEQ ID NO: 666, SEQ ID NO: 689 or SEQ ID NO: 712), MOTIF 1 (SEQ ID NO: 646, SEQ ID NO: 670 or SEQ ID NO: 693), MOTIF 17 (SEQ ID NO: 662, SEQ ID NO: 686 or SEQ ID NO: 709), MOTIF 6 (SEQ ID NO: 651, SEQ ID NO: 675 or SEQ ID NO: 698), MOTIF 12 (SEQ ID NO: 657, SEQ ID NO: 681 or SEQ ID NO: 704), MOTIF 4 (SEQ ID NO: 649, SEQ ID NO: 673 or SEQ ID NO: 696), MOTIF 16 (SEQ ID NO: 661, SEQ ID NO: 685 or SEQ ID NO: 708), MOTIF 5 (SEQ ID NO: 650, SEQ ID NO: 674 or SEQ ID NO: 697), MOTIF 23 (SEQ ID NO: 668, SEQ ID NO: 691 or SEQ ID NO: 714), and MOTIF 3 (SEQ ID NO: 648, SEQ ID NO: 672 or SEQ ID NO: 695).

[0075] In some embodiments the nucleic acid molecule encodes a PtIP-83 polypeptide comprising, sequentially from the N-terminus to the C-terminus, the amino acid sequence motifs: MOTIF 19 (SEQ ID NO: 664, SEQ ID NO: 687 or SEQ ID NO: 710), MOTIF 7 (SEQ ID NO: 652, SEQ ID NO: 676 or SEQ ID NO: 699), MOTIF 13 (SEQ ID NO: 658, SEQ ID NO: 682 or SEQ ID NO: 705), MOTIF 20 (SEQ ID NO: 665, SEQ ID NO: 688 or SEQ ID NO: 711), MOTIF 14 (SEQ ID NO: 659, SEQ ID NO: 683 or SEQ ID NO: 706), MOTIF 2 (SEQ ID NO: 647, SEQ ID NO: 671 or SEQ ID NO: 694), MOTIF 8 (SEQ ID NO: 653, SEQ ID NO: 677 or SEQ ID NO: 700), MOTIF 15 (SEQ ID NO: 660, SEQ ID NO: 684 or SEQ ID NO: 707), MOTIF 9 (SEQ ID NO: 654, SEQ ID NO: 678 or SEQ ID NO: 701), MOTIF 21 (SEQ ID NO: 666, SEQ ID NO: 689 or SEQ ID NO: 712), MOTIF 1 (SEQ ID NO: 646, SEQ ID NO: 670 or SEQ ID NO: 693), MOTIF 17 (SEQ ID NO: 662, SEQ ID NO: 686 or SEQ ID NO: 709), MOTIF 6 (SEQ ID NO: 651, SEQ ID NO: 675 or SEQ ID NO: 698), MOTIF 12 (SEQ ID NO: 657, SEQ ID NO: 681 or SEQ ID NO: 704), MOTIF 4 (SEQ ID NO: 649, SEQ ID NO: 673 or SEQ ID NO: 696), MOTIF 16 (SEQ ID NO: 661, SEQ ID NO: 685 or SEQ ID NO: 708), MOTIF 5 (SEQ ID NO: 650, SEQ ID NO: 674 or SEQ ID NO: 697), MOTIF 23 (SEQ ID NO: 668, SEQ ID NO: 691 or SEQ ID NO: 714), and MOTIF 3 (SEQ ID NO: 648, SEQ ID NO: 672 or SEQ ID NO: 695).

[0076] In some embodiments the nucleic acid molecule encodes a PtIP-83 polypeptide comprising sequentially from the N-terminus to the C-terminus: a Region A of between about 200 to about 300 amino acids in length comprising an amino acid sequence MOTIF of: MOTIF 19 (SEQ ID NO: 664, SEQ ID NO: 687 or SEQ ID NO: 710), MOTIF 7 (SEQ ID NO: 652, SEQ ID NO: 676 or SEQ ID NO: 699), MOTIF 13 (SEQ ID NO: 658, SEQ ID NO: 682 or SEQ ID NO: 705), MOTIF 20 (SEQ ID NO: 665, SEQ ID NO: 688 or SEQ ID NO: 711), MOTIF 10 (SEQ ID NO: 655, SEQ ID NO: 679 or SEQ ID NO: 702), MOTIF 18 (SEQ ID NO: 663), MOTIF 24 (SEQ ID NO: 669, SEQ ID NO: 692 or SEQ ID NO: 715), and/or MOTIF 14 having a predominantly nonconserved secondary structure; a Region B of between about 380 to about 465 amino acids in length comprising an amino acid sequence MOTIF of MOTIF 22 (SEQ ID NO: 667, SEQ ID NO: 690 or SEQ ID NO: 713), MOTIF 2 (SEQ ID NO: 647, SEQ ID NO: 671 or SEQ ID NO: 694), MOTIF 8 (SEQ ID NO: 653, SEQ ID NO: 677 or SEQ ID NO: 700), MOTIF 15 (SEQ ID NO: 660, SEQ ID NO: 684 or SEQ ID NO: 707), MOTIF 9 (SEQ ID NO: 654, SEQ ID NO: 678 or SEQ ID NO: 701), MOTIF 21 (SEQ ID NO: 666, SEQ ID NO: 689 or SEQ ID NO: 712), MOTIF 1 (SEQ ID NO: 646, SEQ ID NO: 670 or SEQ ID NO: 693), MOTIF 17 (SEQ ID NO: 662, SEQ ID NO: 686 or SEQ ID NO: 709), MOTIF 6 (SEQ ID NO: 651, SEQ ID NO: 675 or SEQ ID NO: 698), and/or MOTIF 12 and having a predominately alpha helical structure; and a Region C of between about 150 to about 180 amino acids in length comprising an amino acid sequence MOTIF of MOTIF 16 (SEQ ID NO: 661, SEQ ID NO: 685 or SEQ ID NO: 708), MOTIF 5 (SEQ ID NO: 650, SEQ ID NO: 674 or SEQ ID NO: 697), MOTIF 23 (SEQ ID NO: 668, SEQ ID NO: 691 or SEQ ID NO: 714), and/or MOTIF 3 (SEQ ID NO: 648, SEQ ID NO: 672 or SEQ ID NO: 695), having a consensus secondary structure comprising predominately beta strand structure.

[0077] In some embodiments the PtIP-83 polypeptide comprises an amino acid sequence MOTIF at the positions as shown in Table 2.

[0078] In some embodiments the nucleic acid molecule encodes a PtIP-83 polypeptide comprising sequentially from the N-terminus to the C-terminus: a Region A of between about 200 to about 300 amino acids in length having a predominantly nonconserved secondary structure; a Region B of between about 380 to about 465 amino acids in length having a consensus secondary structure comprising 8 to 10 segments of predominately alpha helical structure; and a Region C of between about 150 to about 180 amino acids in length having a consensus secondary structure comprising 6 to 8 segments of predominately beta strand structure. As used herein “predominantly nonconserved secondary structure” means that the regions of secondary structure don't consistently align within the family of PtIP polypeptides. As used herein “predominately alpha helical structure” means that secondary structure prediction may have one or more gap of between 1 to 6 amino acids of coil and/or beta strand structure intervening in the alpha helix structure. As used herein “predominately beta strand structure” means that secondary structure prediction may have one or more gap of between 1 to 6 amino acids of coil and/or alpha helix structure intervening in the beta strand structure. In some embodiments the secondary structure is generated by the PSIPRED, top ranked secondary structure prediction method (Jones D T. (1999) J. Mol. Biol. 292: 195-202).

[0079] In some embodiments the nucleic acid molecule encodes a PtIP-83 polypeptide comprising sequentially from the N-terminus to the C-terminus: a Region A of between about 200 to about 300 amino acids in length having a predominantly nonconserved secondary structure; a Region B of between about 380 to about 465 amino acids in length having a consensus secondary structure comprising nine segments of predominately alpha helical structure; and a Region C of between about 150 to about 180 amino acids in length having a consensus secondary structure comprising seven segments of predominately beta strand structure.

[0080] In some embodiments the nucleic acid molecule encodes a PtIP-83 polypeptide comprising sequentially from the N-terminus to the C-terminus: a Region A of between about 200 to about 300 amino acids in length having a predominantly nonconserved secondary structure, wherein the Region A comprises a conserved beta strand 1 (β1a) of between about 4 and about 12 amino acids in length within about amino acid residue 30 to about amino acid residue 130 from the N-terminus of the PtIP-83 polypeptide; a Region B of between about 380 to about 465 amino acids in length having a consensus secondary structure comprising nine segments of predominately alpha helical structure; and a Region C of between about 150 to about 180 amino acids in length having a consensus secondary structure comprising seven segments of predominately beta strand structure.

[0081] In some embodiments the nucleic acid molecule encodes a PtIP-83 polypeptide comprising sequentially from the N-terminus to the C-terminus: a Region A of between about 200 to about 300 amino acids in length having a flexible consensus secondary structure, wherein the Region A comprises a conserved beta strand 1 (β1a) of between about 4 and about 12 amino acids in length, a coil of between about 3 and and about 18 amino acids in length and a beta strand 2 (β1b) of between about 4 and about 32 amino acids in length, within about amino acid residue 50 to about amino acid residue 165 from the N-terminus of the PtIP-83 polypeptide; a Region B of between about 380 to about 465 amino acids in length having a consensus secondary structure comprising nine segments of predominately alpha helical structure; and a Region C of between about 150 to about 180 amino acids in length having a consensus secondary structure comprising seven segments of predominately beta strand structure.

[0082] In some embodiments the nucleic acid molecule encodes a PtIP-83 polypeptide comprising sequentially from the N-terminus to the C-terminus: a Region A of between about 200 to about 300 amino acids in length having a predominantly nonconserved secondary structure; a Region B of between about 380 to about 465 amino acids in length having a consensus secondary structure comprising sequentially: i) an alpha helix-1 of between about 10 and about 26 amino acids in length; ii) a coil-1 of between about 2 and about 8 amino acids in length flanked by alpha helix-1 and alpha helix-2; iii) an alpha helix-2 of between about 15 and about 24 amino acids in length; iv) a coil-2 of between about 4 and about 14 amino acids in length flanked by alpha helix-2 and alpha helix-3; v) an alpha helix 3 of between about 15 and about 27 amino acids in length; vi) a coil-3 of between about 11 and about 13 amino acids in length flanked by alpha helix-3 and alpha helix-4; vii) an alpha helix-4 of about 24 180 amino acids in length; viii) a coil-4 of between about 4 and about 5 amino acids in length flanked by alpha helix-4 and alpha helix-5; ix) an alpha helix-5 of between about 50 and about 54 amino acids in length; x) a coil-5 of between about 11 and about 17 amino acids in length flanked by alpha helix-5 and alpha helix-6; xi) an alpha helix-6 of between about 15 and about 16 amino acids in length; xii) a coil-6 of between about 6 and about 9 amino acids in length flanked by alpha helix-6 and alpha helix-7; xiii) an alpha helix-7 of between about 49 and about 55 amino acids in length; xiv) a coil-7 of between about 3 and about 8 amino acids in length flanked by alpha helix-7 and alpha helix-8; xv) an alpha helix-8 of between about 33 and about 36 amino acids in length; xvi) a coil-8 of between about 14 and about 16 amino acids in length flanked by alpha helix-8 and alpha helix-9; xvii) an alpha helix-9 of between about 16 and about 23 amino acids in length; xviii) a coil-9 of between about 21 and about 28 amino acids in length flanked by alpha helix-9 and Region C; and a Region C of between about 150 to about 180 amino acids in length having a consensus secondary structure comprising seven segments of predominately beta strand structure.

[0083] In some embodiments the nucleic acid molecule encodes a PtIP-83 polypeptide comprising sequentially from the N-terminus to the C-terminus: a Region A of between about 200 to about 300 amino acids in length having a predominantly nonconserved secondary structure; a Region B of between about 380 to about 465 amino acids in length having a consensus secondary structure comprising nine segments of predominately alpha helical structure; and a Region C of between about 150 to about 180 amino acids in length having a consensus secondary structure comprising sequentially: i) a beta strand-1 (β1) of between about 3 amino acids and about 5 amino acids in length; ii) a coil of between about 13 amino acids and about 17 amino acids in length; iii) a beta strand-2 (β2) of between about 7 amino acids and about 11 amino acids in length; iv) a coil of between about 17 amino acids and about 23 amino acids in length; v) a beta strand-3 (β3) of between about 5 amino acids and about 7 amino acids in length; vi) a coil of between about 12 amino acids and about 14 amino acids in length; vii) a beta strand-4 (β4) of between about 5 amino acids and about 6 amino acids in length; viii) a coil of between about 2 amino acids and about 7 amino acids in length; ix) a beta strand-5 (β5) of between about 5 amino acids and about 7 amino acids in length; x) a coil of between about 26 amino acids and about 28 amino acids in length; xi) a beta strand-6 (β6) of between about 5 amino acids and about 7 amino acids in length; xii) a coil of between about 16 amino acids and about 20 amino acids in length; and xiii) a beta strand-1 (β7) of between about 13 amino acids and about 17 amino acids in length.

[0084] In some embodiments the nucleic acid molecule encodes a PtIP-83 polypeptide comprising sequentially from the N-terminus to the C-terminus: a Region A of between about 200 to about 300 amino acids in length having a predominantly nonconserved secondary structure; a Region B of between about 380 to about 465 amino acids in length having a consensus secondary structure comprising sequentially: i) an alpha helix-1 of between about 10 and about 26 amino acids in length; ii) a coil-1 of between about 2 and about 8 amino acids in length flanked by alpha helix-1 and alpha helix-2; iii) an alpha helix-2 of between about 15 and about 24 amino acids in length; iv) a coil-2 of between about 4 and about 14 amino acids in length flanked by alpha helix-2 and alpha helix-3; v) an alpha helix 3 of between about 15 and about 27 amino acids in length; vi) a coil-3 of between about 11 and about 13 amino acids in length flanked by alpha helix-3 and alpha helix-4; vii) an alpha helix-4 of about 24 180 amino acids in length; viii) a coil-4 of between about 4 and about 5 amino acids in length flanked by alpha helix-4 and alpha helix-5; ix) an alpha helix-5 of between about 50 and about 54 amino acids in length; x) a coil-5 of between about 11 and about 17 amino acids in length flanked by alpha helix-5 and alpha helix-6; xi) an alpha helix-6 of between about 15 and about 16 amino acids in length; xii) a coil-6 of between about 6 and about 9 amino acids in length flanked by alpha helix-6 and alpha helix-7; xiii) an alpha helix-7 of between about 49 and about 55 amino acids in length; xiv) a coil-7 of between about 3 and about 8 amino acids in length flanked by alpha helix-7 and alpha helix-8; xv) an alpha helix-8 of between about 33 and about 36 amino acids in length; xvi) a coil-8 of between about 14 and about 16 amino acids in length flanked by alpha helix-8 and alpha helix-9; xvii) an alpha helix-9 of between about 16 and about 23 amino acids in length; xviii) a coil-9 of between about 21 and about 28 amino acids in length flanked by alpha helix-9 and Region C; and a Region C of between about 150 to about 180 amino acids in length having a consensus secondary structure comprising sequentially: i) a beta strand-1 (β1) of between about 3 amino acids and about 5 amino acids in length; ii) a coil of between about 13 amino acids and about 17 amino acids in length; iii) a beta strand-2 (β2) of between about 7 amino acids and about 11 amino acids in length; iv) a coil of between about 17 amino acids and about 23 amino acids in length; v) a beta strand-3 (β3) of between about 5 amino acids and about 7 amino acids in length; vi) a coil of between about 12 amino acids and about 14 amino acids in length; vii) a beta strand-4 (β4) of between about 5 amino acids and about 6 amino acids in length; viii) a coil of between about 2 amino acids and about 7 amino acids in length; ix) a beta strand-5 (β5) of between about 5 amino acids and about 7 amino acids in length; x) a coil of between about 26 amino acids and about 28 amino acids in length; xi) a beta strand-6 (β6) of between about 5 amino acids and about 7 amino acids in length; xii) a coil of between about 16 amino acids and about 20 amino acids in length; and xiii) a beta strand-1 (β7) of between about 13 amino acids and about 17 amino acids in length.

[0085] In some embodiments the nucleic acid molecule encodes a PtIP-83 polypeptide comprising sequentially from the N-terminus to the C-terminus: a Region A of between about 200 to about 300 amino acids in length having a flexible consensus secondary structure, wherein the Region A comprises a conserved beta strand 1 (β1a) of between about 4 and about 12 amino acids in length within about amino acid residue 30 to about amino acid residue 130 from the N-terminus of the PtIP-83 polypeptide; a Region B of between about 380 to about 465 amino acids in length having a consensus secondary structure comprising sequentially: i) an alpha helix-1 of between about 10 and about 26 amino acids in length; ii) a coil-1 of between about 2 and about 8 amino acids in length flanked by alpha helix-1 and alpha helix-2; iii) an alpha helix-2 of between about 15 and about 24 amino acids in length; iv) a coil-2 of between about 4 and about 14 amino acids in length flanked by alpha helix-2 and alpha helix-3; v) an alpha helix 3 of between about 15 and about 27 amino acids in length; vi) a coil-3 of between about 11 and about 13 amino acids in length flanked by alpha helix-3 and alpha helix-4; vii) an alpha helix-4 of about 24 180 amino acids in length; viii) a coil-4 of between about 4 and about 5 amino acids in length flanked by alpha helix-4 and alpha helix-5; ix) an alpha helix-5 of between about 50 and about 54 amino acids in length; x) a coil-5 of between about 11 and about 17 amino acids in length flanked by alpha helix-5 and alpha helix-6; xi) an alpha helix-6 of between about 15 and about 16 amino acids in length; xii) a coil-6 of between about 6 and about 9 amino acids in length flanked by alpha helix-6 and alpha helix-7; xiii) an alpha helix-7 of between about 49 and about 55 amino acids in length; xiv) a coil-7 of between about 3 and about 8 amino acids in length flanked by alpha helix-7 and alpha helix-8; xv) an alpha helix-8 of between about 33 and about 36 amino acids in length; xvi) a coil-8 of between about 14 and about 16 amino acids in length flanked by alpha helix-8 and alpha helix-9; xvii) an alpha helix-9 of between about 16 and about 23 amino acids in length; xviii) a coil-9 of between about 21 and about 28 amino acids in length flanked by alpha helix-9 and Region C; and a Region C of between about 150 to about 180 amino acids in length having a consensus secondary comprising sequentially: i) a beta strand-1 (β1) of between about 3 amino acids and about 5 amino acids in length; ii) a coil of between about 13 amino acids and about 17 amino acids in length; iii) a beta strand-2 (β2) of between about 7 amino acids and about 11 amino acids in length; iv) a coil of between about 17 amino acids and about 23 amino acids in length; v) a beta strand-3 (β3) of between about 5 amino acids and about 7 amino acids in length; vi) a coil of between about 12 amino acids and about 14 amino acids in length; vii) a beta strand-4 (β4) of between about 5 amino acids and about 6 amino acids in length; viii) a coil of between about 2 amino acids and about 7 amino acids in length; ix) a beta strand-5 (β5) of between about 5 amino acids and about 7 amino acids in length; x) a coil of between about 26 amino acids and about 28 amino acids in length; xi) a beta strand-6 (β6) of between about 5 amino acids and about 7 amino acids in length; xii) a coil of between about 16 amino acids and about 20 amino acids in length; and xiii) a beta strand-1 (β7) of between about 13 amino acids and about 17 amino acids in length.

[0086] Also provided are nucleic acid molecules that encode transcription and/or translation products that are subsequently spliced to ultimately produce functional PtIP-83 polypeptides. Splicing can be accomplished in vitro or in vivo, and can involve cis- or trans-splicing. The substrate for splicing can be polynucleotides (e.g., RNA transcripts) or polypeptides. An example of cis-splicing of a polynucleotide is where an intron inserted into a coding sequence is removed and the two flanking exon regions are spliced to generate a PtIP-83 polypeptide encoding sequence. An example of trans splicing would be where a polynucleotide is encrypted by separating the coding sequence into two or more fragments that can be separately transcribed and then spliced to form the full-length pesticidal encoding sequence. The use of a splicing enhancer sequence, which can be introduced into a construct, can facilitate splicing either in cis or trans-splicing of polypeptides (U.S. Pat. Nos. 6,365,377 and 6,531,316). Thus, in some embodiments the polynucleotides do not directly encode a full-length PtIP-83 polypeptide, but rather encode a fragment or fragments of a PtIP-83 polypeptide. These polynucleotides can be used to express a functional PtIP-83 polypeptide through a mechanism involving splicing, where splicing can occur at the level of polynucleotide (e.g., intron/exon) and/or polypeptide (e.g., intein/extein). This can be useful, for example, in controlling expression of pesticidal activity, since a functional pesticidal polypeptide will only be expressed if all required fragments are expressed in an environment that permits splicing processes to generate functional product. In another example, introduction of one or more insertion sequences into a polynucleotide can facilitate recombination with a low homology polynucleotide; use of an intron or intein for the insertion sequence facilitates the removal of the intervening sequence, thereby restoring function of the encoded variant.

[0087] Nucleic acid molecules that are fragments of these nucleic acid sequences encoding PtIP-83 polypeptides are also encompassed by the embodiments. “Fragment” as used herein refers to a portion of the nucleic acid sequence encoding a PtIP-83 polypeptide. A fragment of a nucleic acid sequence may encode a biologically active portion of a PtIP-83 polypeptide or it may be a fragment that can be used as a hybridization probe or PCR primer using methods disclosed below. Nucleic acid molecules that are fragments of a nucleic acid sequence encoding a PtIP-83 polypeptide comprise at least about 150, 180, 210, 240, 270, 300, 330 or 360, contiguous nucleotides or up to the number of nucleotides present in a full-length nucleic acid sequence encoding a PtIP-83 polypeptide disclosed herein, depending upon the intended use. “Contiguous nucleotides” is used herein to refer to nucleotide residues that are immediately adjacent to one another. Fragments of the nucleic acid sequences of the embodiments will encode protein fragments that retain the biological activity of the PtIP-83 polypeptide and, hence, retain insecticidal activity. “Retains insecticidal activity” is used herein to refer to a polypeptide having at least about 10%, at least about 30%, at least about 50%, at least about 70%, 80%, 90%, 95% or higher of the insecticidal activity of the full-length PtIP-83Aa polypeptide (SEQ ID NO: 1). In some embodiments, the insecticidal activity is Lepidoptera activity. In one embodiment, the insecticidal activity is against a Coleopteran species. In some embodiments, the insecticidal activity is against one or more insect pests of the corn rootworm complex: western corn rootworm, Diabrotica virgifera; northern corn rootworm, D. barberi: Southern corn rootworm or spotted cucumber beetle; Diabrotica undecimpunctata howardi, and the Mexican corn rootworm, D. virgifera zeae. In one embodiment, the insecticidal activity is against a Diabrotica species.

[0088] In some embodiments a fragment of a nucleic acid sequence encoding a PtIP-83 polypeptide encoding a biologically active portion of a protein will encode at least about 15, 20, 30, 50, 75, 100, 125, contiguous amino acids or up to the total number of amino acids present in a full-length PtIP-83 polypeptide of the embodiments. In some embodiments, the fragment is an N-terminal and/or a C-terminal truncation of at least about 1, 2, 3, 4, 5, 6, 7, 8, 9, 10, 11, 12, 13, 14, 15, 16, 17, 18, 19, 20, 21, 22, 23, 24, 25, 26, 27, 28, 29, 30, 31, 32, 33, 34 or more amino acids from the N-terminus and/or C-terminus relative to SEQ ID NO: 1, SEQ ID NO: 3, SEQ ID NO: 5, SEQ ID NO: 7, SEQ ID NO: 9, SEQ ID NO: 11, SEQ ID NO: 13, SEQ ID NO: 15, SEQ ID NO: 17, SEQ ID NO: 19, SEQ ID NO: 21, SEQ ID NO: 23 or SEQ ID NO: 716, SEQ ID NO: 754, SEQ ID NO: 755, SEQ ID NO: 756, SEQ ID NO: 757, SEQ ID NO: 758, SEQ ID NO: 759, SEQ ID NO: 760, SEQ ID NO: 761, SEQ ID NO: 762, SEQ ID NO: 763, SEQ ID NO: 764, SEQ ID NO: 765, SEQ ID NO: 766, SEQ ID NO: 767, SEQ ID NO: 768, SEQ ID NO: 769 or SEQ ID NOs: 958-1026, variants thereof, e.g., by proteolysis, insertion of a start codon, deletion of the codons encoding the deleted amino acids with the concomitant insertion of a stop codon or by insertion of a stop codon in the coding sequence. In some embodiments, the fragments encompassed herein result from the removal of the N-terminal 1, 2, 3, 4, 5, 6, 7, 8, 9, 10, 11, 12, 13, 14, 15, 16, 17, 18, 19, 20, 21, 22, 23, 24, 25 or more amino acids from the N-terminus relative to SEQ ID NO: 1, SEQ ID NO: 3, SEQ ID NO: 5, SEQ ID NO: 7, SEQ ID NO: 9, SEQ ID NO: 11, SEQ ID NO: 13, SEQ ID NO: 15, SEQ ID NO: 17, SEQ ID NO: 19, SEQ ID NO: 21, SEQ ID NO: 23, SEQ ID NO: 716, SEQ ID NO: 754, SEQ ID NO: 755, SEQ ID NO: 756, SEQ ID NO: 757, SEQ ID NO: 758, SEQ ID NO: 759, SEQ ID NO: 760, SEQ ID NO: 761, SEQ ID NO: 762, SEQ ID NO: 763, SEQ ID NO: 764, SEQ ID NO: 765, SEQ ID NO: 766, SEQ ID NO: 767, SEQ ID NO: 768, SEQ ID NO: 769, SEQ ID NOs: 958-1026, or variants thereof, e.g., by proteolysis or by insertion of a start codon in the coding sequence. In some embodiments, the fragments encompassed herein result from the removal of the N-terminal 1, 2, 3, 4, 5, 6, 7, 8, 9, 10, 11, 12, 13, 14 amino acids relative to SEQ ID NO: 1, SEQ ID NO: 3, SEQ ID NO: 5, SEQ ID NO: 7, SEQ ID NO: 9, SEQ ID NO: 11, SEQ ID NO: 13, SEQ ID NO: 15, SEQ ID NO: 17, SEQ ID NO: 19, SEQ ID NO: 21, SEQ ID NO: 23, SEQ ID NO: 716, SEQ ID NO: 754, SEQ ID NO: 755, SEQ ID NO: 756, SEQ ID NO: 757, SEQ ID NO: 758, SEQ ID NO: 759, SEQ ID NO: 760, SEQ ID NO: 761, SEQ ID NO: 762, SEQ ID NO: 763, SEQ ID NO: 764, SEQ ID NO: 765, SEQ ID NO: 766, SEQ ID NO: 767, SEQ ID NO: 768, SEQ ID NO: 769, or SEQ ID NOs: 958-1026, or variants thereof, e.g., by proteolysis or by insertion of a start codon in the coding sequence.

[0089] In some embodiments the PtIP-83 polypeptide is encoded by a nucleic acid sequence sufficiently homologous to the nucleic acid sequence of SEQ ID NO: 2, SEQ ID NO: 4, SEQ ID NO: 6, SEQ ID NO: 8, SEQ ID NO: 10, SEQ ID NO: 12, SEQ ID NO: 14, SEQ ID NO: 16, SEQ ID NO: 18, SEQ ID NO: 20, SEQ ID NO: 22, SEQ ID NO: 24, SEQ ID NO: 717, SEQ ID NO: 738, SEQ ID NO: 739, SEQ ID NO: 740, SEQ ID NO: 741, SEQ ID NO: 742, SEQ ID NO: 743, SEQ ID NO: 744, SEQ ID NO: 745, SEQ ID NO: 746, SEQ ID NO: 747, SEQ ID NO: 748, SEQ ID NO: 749, SEQ ID NO: 750, SEQ ID NO: 751, SEQ ID NO: 752, SEQ ID NO: 753, or SEQ ID NOs: 958-1026. “Sufficiently homologous” is used herein to refer to an amino acid or nucleic acid sequence that has at least about 50%, 55%, 60%, 65%, 70%, 75%, 80%, 81%, 82%, 83%, 84%, 85%, 86%, 87%, 88%, 89%, 90%, 91%, 92%, 93%, 94%, 95%, 96%, 97%, 98%, 99% or greater sequence homology compared to a reference sequence using one of the alignment programs described herein using standard parameters. One of skill in the art will recognize that these values can be appropriately adjusted to determine corresponding homology of proteins encoded by two nucleic acid sequences by taking into account codon degeneracy, amino acid similarity, reading frame positioning, and the like.

[0090] In some embodiments the sequence homology is against the full length sequence of the polynucleotide encoding a PtIP-83 polypeptide or against the full length sequence of a PtIP-83 polypeptide.

[0091] In some embodiments the nucleic acid encoding a PtIP-83 polypeptide is selected from SEQ ID NO: 2, SEQ ID NO: 4, SEQ ID NO: 6, SEQ ID NO: 8, SEQ ID NO: 10, SEQ ID NO: 12, SEQ ID NO: 14, SEQ ID NO: 16, SEQ ID NO: 18, SEQ ID NO: 20, SEQ ID NO: 22, SEQ ID NO: 24, SEQ ID NO: 28, SEQ ID NO: 29, any one of SEQ ID NO: 172-235, any one of SEQ ID NO: 300-333, any one of SEQ ID NO: 368-397, any one of SEQ ID NO: 428-517, SEQ ID NO: 717, any one of SEQ ID NO: 718-727, and any one of SEQ ID NO: 738-753.

[0092] In some embodiments the nucleic acid encodes a PtIP-83 polypeptide having at least about 50%, 55%, 60%, 65%, 70%, 75%, 80%, 81%, 82%, 83%, 84%, 85%, 86%, 87%, 88%, 89%, 90%, 91%, 92%, 93%, 94%, 95%, 96%, 97%, 98%, 99% or greater sequence identity compared to SEQ ID NO: 1, SEQ ID NO: 3, SEQ ID NO: 5, SEQ ID NO: 7, SEQ ID NO: 9, SEQ ID NO: 11, SEQ ID NO: 13, SEQ ID NO: 15, SEQ ID NO: 17, SEQ ID NO: 19, SEQ ID NO: 21, SEQ ID NO: 23, SEQ ID NO: 716, SEQ ID NO: 754, SEQ ID NO: 755, SEQ ID NO: 756, SEQ ID NO: 757, SEQ ID NO: 758, SEQ ID NO: 759, SEQ ID NO: 760, SEQ ID NO: 761, SEQ ID NO: 762, SEQ ID NO: 763, SEQ ID NO: 764, SEQ ID NO: 765, SEQ ID NO: 766, SEQ ID NO: 767, SEQ ID NO: 768 or SEQ ID NO: 769. In some embodiments the sequence identity is calculated using ClustalW algorithm in the ALIGNX® module of the Vector NTI® Program Suite (Invitrogen Corporation, Carlsbad, Calif.) with all default parameters. In some embodiments the sequence identity is across the entire length of polypeptide calculated using ClustalW algorithm in the ALIGNX module of the Vector NTI Program Suite (Invitrogen Corporation, Carlsbad, Calif.) with all default parameters.

[0093] To determine the percent identity of two amino acid sequences or of two nucleic acid sequences, the sequences are aligned for optimal comparison purposes. The percent identity between the two sequences is a function of the number of identical positions shared by the sequences (i.e., percent identity=number of identical positions/total number of positions (e.g., overlapping positions)×100). In one embodiment, the two sequences are the same length. In another embodiment, the comparison is across the entirety of the reference sequence (e.g., across the entirety of SEQ ID NO: 1). The percent identity between two sequences can be determined using techniques similar to those described below, with or without allowing gaps. In calculating percent identity, typically exact matches are counted.

[0094] The determination of percent identity between two sequences can be accomplished using a mathematical algorithm. A non-limiting example of a mathematical algorithm utilized for the comparison of two sequences is the algorithm of Karlin and Altschul, (1990) Proc. Natl. Acad. Sci. USA 87:2264, modified as in Karlin and Altschul, (1993) Proc. Natl. Acad. Sci. USA 90:5873-5877. Such an algorithm is incorporated into the BLASTN and BLASTX programs of Altschul, et al., (1990) J. Mol. Biol. 215:403. BLAST nucleotide searches can be performed with the BLASTN program, score=100, wordlength=12, to obtain nucleic acid sequences homologous to pesticidal nucleic acid molecules of the embodiments. BLAST protein searches can be performed with the BLASTX program, score=50, wordlength=3, to obtain amino acid sequences homologous to pesticidal protein molecules of the embodiments. To obtain gapped alignments for comparison purposes, Gapped BLAST (in BLAST 2.0) can be utilized as described in Altschul, et al., (1997) Nucleic Acids Res. 25:3389. Alternatively, PSI-Blast can be used to perform an iterated search that detects distant relationships between molecules. See, Altschul, et al., (1997) supra. When utilizing BLAST, Gapped BLAST, and PSI-Blast programs, the default parameters of the respective programs (e.g., BLASTX and BLASTN) can be used. Alignment may also be performed manually by inspection.

[0095] Another non-limiting example of a mathematical algorithm utilized for the comparison of sequences is the ClustalW algorithm (Higgins, et al., (1994) Nucleic Acids Res. 22:4673-4680). ClustalW compares sequences and aligns the entirety of the amino acid or DNA sequence, and thus can provide data about the sequence conservation of the entire amino acid sequence. The ClustalW algorithm is used in several commercially available DNA/amino acid analysis software packages, such as the ALIGNX® module of the Vector NTI® Program Suite (Invitrogen Corporation, Carlsbad, Calif.). After alignment of amino acid sequences with ClustalW, the percent amino acid identity can be assessed. A non-limiting example of a software program useful for analysis of ClustalW alignments is GENEDOC™. GENEDOC™ (Karl Nicholas) allows assessment of amino acid (or DNA) similarity and identity between multiple proteins. Another non-limiting example of a mathematical algorithm utilized for the comparison of sequences is the algorithm of Myers and Miller, (1988) CABIOS 4:11-17. Such an algorithm is incorporated into the ALIGN program (version 2.0), which is part of the GCG Wisconsin Genetics Software Package, Version 10 (available from Accelrys, Inc., 9685 Scranton Rd., San Diego, Calif., USA). When utilizing the ALIGN program for comparing amino acid sequences, a PAM120 weight residue table, a gap length penalty of 12, and a gap penalty of 4 can be used.

[0096] Another non-limiting example of a mathematical algorithm utilized for the comparison of sequences is the algorithm of Needleman and Wunsch, (1970) J. Mol. Biol. 48(3):443-453, used GAP Version 10 software to determine sequence identity or similarity using the following default parameters: % identity and % similarity for a nucleic acid sequence using GAP Weight of 50 and Length Weight of 3, and the nwsgapdna.cmpii scoring matrix; % identity or % similarity for an amino acid sequence using GAP weight of 8 and length weight of 2, and the BLOSUM62 scoring program. Equivalent programs may also be used. “Equivalent program” is used herein to refer to any sequence comparison program that, for any two sequences in question, generates an alignment having identical nucleotide residue matches and an identical percent sequence identity when compared to the corresponding alignment generated by GAP Version 10.

[0097] The embodiments also encompass nucleic acid molecules encoding PtIP-83 polypeptide variants. “Variants” of the PtIP-83 polypeptide encoding nucleic acid sequences include those sequences that encode the PtIP-83 polypeptides disclosed herein but that differ conservatively because of the degeneracy of the genetic code as well as those that are sufficiently identical as discussed above. Naturally occurring allelic variants can be identified with the use of well-known molecular biology techniques, such as polymerase chain reaction (PCR) and hybridization techniques as outlined below. Variant nucleic acid sequences also include synthetically derived nucleic acid sequences that have been generated, for example, by using site-directed mutagenesis but which still encode the PtIP-83 polypeptides disclosed as discussed below.

[0098] The present disclosure provides isolated or recombinant polynucleotides that encode any of the PtIP-83 polypeptides disclosed herein. Those having ordinary skill in the art will readily appreciate that due to the degeneracy of the genetic code, a multitude of nucleotide sequences encoding PtIP-83 polypeptides of the present disclosure exist. Table 1 is a codon table that provides the synonymous codons for each amino acid. For example, the codons AGA, AGG, CGA, CGC, CGG, and CGU all encode the amino acid arginine. Thus, at every position in the nucleic acids of the disclosure where an arginine is specified by a codon, the codon can be altered to any of the corresponding codons described above without altering the encoded polypeptide. It is understood that U in an RNA sequence corresponds to T in a DNA sequence.

TABLE 1

| | | | | | | | | |
|---|---|---|---|---|---|---|---|---|
| Alanine | Ala | A | GCA | GCC | GCG | GC | | |
| Cystine | Cys | | UGC | UGU | | | | |
| Aspartic acid | Asp | D | GAC | GAU | | | | |
| Glutamic acid | Glu | E | GAA | GAG | | | | |
| Phenylalanine | Phe | F | UUC | UUU | | | | |
| Glycine | Gly | G | GGA | GGC | GGG | GGU | | |
| Histidine | His | | CAC | CAU | | | | |
| Isoleucine | II | I | AUA | AUC | AUU | | | |
| Lysine | Lys | K | AAA | AAG | | | | |
| Leucine | Leu | L | UUA | UUG | CUA | CUC | CUG | C U |
| Methionine | Me | M | AUG | | | | | |
| Asparagine | Asn | N | AAC | AAU | | | | |
| Proline | Pro | P | CCA | CCC | CCG | CCU | | |
| Glutamine | Gln | Q | CAA | CAG | | | | |
| Arginine | Arg | R | AGA | AGG | CGA | CGC | CGG | CGU |
| Serine | Ser | S | AGC | AGU | UCA | UCC | UCG | UCC |
| Threonine | Thr | T | ACA | ACC | ACG | ACU | | |
| Valine | Val | V | GUA | GUC | GUG | GUU | | |
| Tryptophan | Trp | W | TGG | | | | | |
| Tyrosine | Tyr | Y | UAC | UAU | | | | |

[0099] The skilled artisan will further appreciate that changes can be introduced by mutation of the nucleic acid sequences thereby leading to changes in the amino acid sequence of the encoded PtIP-83 polypeptides, without altering the biological activity of the proteins. Thus, variant nucleic acid molecules can be created by introducing one or more nucleotide substitutions, additions and/or deletions into the corresponding nucleic acid sequence disclosed herein, such that one or more amino acid substitutions, additions or deletions are introduced into the encoded protein. Mutations can be introduced by standard techniques, such as site-directed mutagenesis and PCR-mediated mutagenesis. Such variant nucleic acid sequences are also encompassed by the present disclosure.

[0100] Alternatively, variant nucleic acid sequences can be made by introducing mutations randomly along all or part of the coding sequence, such as by saturation mutagenesis, and the resultant mutants can be screened for ability to confer pesticidal activity to identify mutants that retain activity. Following mutagenesis, the encoded protein can be expressed recombinantly, and the activity of the protein can be determined using standard assay techniques.

[0101] The polynucleotides of the disclosure and fragments thereof are optionally used as substrates for a variety of recombination and recursive recombination reactions, in addition to standard cloning methods as set forth in, e.g., Ausubel, Berger and Sambrook, i.e., to produce additional pesticidal polypeptide homologues and fragments thereof with desired properties. A variety of such reactions are known, including those developed by the inventors and their co-workers. Methods for producing a variant of any nucleic acid listed herein comprising recursively recombining such polynucleotide with a second (or more) polynucleotide, thus forming a library of variant polynucleotides are also embodiments of the disclosure, as are the libraries produced, the cells comprising the libraries and any recombinant polynucleotide produces by such methods. Additionally, such methods optionally comprise selecting a variant polynucleotide from such libraries based on pesticidal activity, as is wherein such recursive recombination is done in vitro or in vivo.

[0102] A variety of diversity generating protocols, including nucleic acid recursive recombination protocols are available and fully described in the art. The procedures can be used separately, and/or in combination to produce one or more variants of a nucleic acid or set of nucleic acids, as well as variants of encoded proteins. Individually and collectively, these procedures provide robust, widely applicable ways of generating diversified nucleic acids and sets of nucleic acids (including, e.g., nucleic acid libraries) useful, e.g., for the engineering or rapid evolution of nucleic acids, proteins, pathways, cells and/or organisms with new and/or improved characteristics.

[0103] While distinctions and classifications are made in the course of the ensuing discussion for clarity, it will be appreciated that the techniques are often not mutually exclusive. Indeed, the various methods can be used singly or in combination, in parallel or in series, to access diverse sequence variants.

[0104] The result of any of the diversity generating procedures described herein can be the generation of one or more nucleic acids, which can be selected or screened for nucleic acids with or which confer desirable properties or that encode proteins with or which confer desirable properties. Following diversification by one or more of the methods herein or otherwise available to one of skill, any nucleic acids that are produced can be selected for a desired activity or property, e.g. pesticidal activity or, such activity at a desired pH, etc. This can include identifying any activity that can be detected, for example, in an automated or automatable format, by any of the assays in the art, see, e.g., discussion of screening of insecticidal activity, infra. A variety of related (or even unrelated) properties can be evaluated, in serial or in parallel, at the discretion of the practitioner.

[0105] Descriptions of a variety of diversity generating procedures for generating modified nucleic acid sequences, e.g., those coding for polypeptides having pesticidal activity or fragments thereof, are found in the following publications and the references cited therein: Soong, et al., (2000) Nat Genet 25(4):436-439; Stemmer, et al., (1999) Tumor Targeting 4:1-4; Ness, et al., (1999) Nat Biotechnol 17:893-896; Chang, et al., (1999) Nat Biotechnol 17:793-797; Minshull and Stemmer, (1999) Curr Opin Chem Biol 3:284-290; Christians, et al., (1999) Nat Biotechnol 17:259-264; Crameri, et al., (1998) Nature 391:288-291; Crameri, et al., (1997) Nat Biotechnol 15:436-438; Zhang, et al., (1997) PNAS USA 94:4504-4509; Patten, et al., (1997) Curr Opin Biotechnol 8:724-733; Crameri, et al., (1996) Nat Med 2:100-103; Crameri, et al., (1996) Nat Biotechnol 14:315-319; Gates, et al., (1996) J Mol Biol 255:373-386; Stemmer, (1996) “Sexual PCR and Assembly PCR” In: The Encyclopedia of Molecular Biology. VCH Publishers, New York. pp. 447-457; Crameri and Stemmer, (1995) BioTechniques 18:194-195; Stemmer, et al., (1995) Gene, 164:49-53; Stemmer, (1995) Science 270: 1510; Stemmer, (1995) Bio/Technology 13:549-553; Stemmer, (1994) Nature 370:389-391 and Stemmer, (1994) PNAS USA 91:10747-10751.

[0106] Mutational methods of generating diversity include, for example, site-directed mutagenesis (Ling, et al., (1997) Anal Biochem 254(2):157-178; Dale, et al., (1996) Methods Mol Biol 57:369-374; Smith, (1985) Ann Rev Genet 19:423-462; Botstein and Shortle, (1985) Science 229:1193-1201; Carter, (1986) Biochem J237:1-7 and Kunkel, (1987) “The efficiency of oligonucleotide directed mutagenesis” in Nucleic Acids & Molecular Biology (Eckstein and Lilley, eds., Springer Verlag, Berlin)); mutagenesis using uracil containing templates (Kunkel, (1985) PNAS USA 82:488-492; Kunkel, et al., (1987) Methods Enzymol 154:367-382 and Bass, et al., (1988) Science 242:240-245); oligonucleotide-directed mutagenesis (Zoller and Smith, (1983) Methods Enzymol 100:468-500; Zoller and Smith, (1987) Methods Enzymol 154:329-350 (1987); Zoller and Smith, (1982) Nucleic Acids Res 10:6487-6500), phosphorothioate-modified DNA mutagenesis (Taylor, et al., (1985) Nucl Acids Res 13:8749-8764; Taylor, et al., (1985) Nucl Acids Res 13:8765-8787 (1985); Nakamaye and Eckstein, (1986) Nucl Acids Res 14:9679-9698; Sayers, et al., (1988) Nucl Acids Res 16:791-802 and Sayers, et al., (1988) Nucl Acids Res 16:803-814); mutagenesis using gapped duplex DNA (Kramer, et al., (1984) Nucl Acids Res 12:9441-9456; Kramer and Fritz, (1987) Methods Enzymol 154:350-367; Kramer, et al., (1988) Nucl Acids Res 16:7207 and Fritz, et al., (1988) Nucl Acids Res 16:6987-6999).

[0107] Additional suitable methods include point mismatch repair (Kramer, et al., (1984) Cell 38:879-887), mutagenesis using repair-deficient host strains (Carter, et al., (1985) Nucl Acids Res 13:4431-4443 and Carter, (1987) Methods in Enzymol 154:382-403), deletion mutagenesis (Eghtedarzadeh and Henikoff, (1986) Nucl Acids Res 14:5115), restriction-selection and restriction-purification (Wells, et al., (1986) Phil Trans R Soc Lond A 317:415-423), mutagenesis by total gene synthesis (Nambiar, et al., (1984) Science 223:1299-1301; Sakamar and Khorana, (1988) Nucl Acids Res 14:6361-6372; Wells, et al., (1985) Gene 34:315-323 and Grundström, et al., (1985) Nucl Acids Res 13:3305-3316), double-strand break repair (Mandecki, (1986) PNAS USA, 83:7177-7181 and Arnold, (1993) Curr Opin Biotech 4:450-455). Additional details on many of the above methods can be found in Methods Enzymol Volume 154, which also describes useful controls for trouble-shooting problems with various mutagenesis methods. Additional details regarding various diversity generating methods can be found in the following US Patents, PCT Publications and Applications and EPO publications: U.S. Pat. Nos. 5,723,323, 5,763,192, 5,814,476, 5,817,483, 5,824,514, 5,976,862, 5,605,793, 5,811,238, 5,830,721, 5,834,252, 5,837,458, WO 1995/22625, WO 1996/33207, WO 1997/20078, WO 1997/35966, WO 1999/41402, WO 1999/41383, WO 1999/41369, WO 1999/41368, EP 752008, EP 0932670, WO 1999/23107, WO 1999/21979, WO 1998/31837, WO 1998/27230, WO 1998/27230, WO 2000/00632, WO 2000/09679, WO 1998/42832, WO 1999/29902, WO 1998/41653, WO 1998/41622, WO 1998/42727, WO 2000/18906, WO 2000/04190, WO 2000/42561, WO 2000/42559, WO 2000/42560, WO 2001/23401 and PCT/US01/06775.

[0108] The nucleotide sequences of the embodiments can also be used to isolate corresponding sequences from ferns or other primitive plant, particularly a Asplenium, Polypodium, Adiantum, Platycerium, Nephrolepis, Ophioglossum, Colysis, Bolbitis, Blechnum, Selaginella, Lycopodium, and Huperzia species. In this manner, methods such as PCR, hybridization, and the like can be used to identify such sequences based on their sequence homology to the sequences set forth herein. Sequences that are selected based on their sequence identity to the entire sequences set forth herein or to fragments thereof are encompassed by the embodiments. Such sequences include sequences that are orthologs of the disclosed sequences. The term “orthologs” refers to genes derived from a common ancestral gene and which are found in different species as a result of speciation. Genes found in different species are considered orthologs when their nucleotide sequences and/or their encoded protein sequences share substantial identity as defined elsewhere herein. Functions of orthologs are often highly conserved among species.

[0109] In a PCR approach, oligonucleotide primers can be designed for use in PCR reactions to amplify corresponding DNA sequences from cDNA or genomic DNA extracted from any organism of interest. Methods for designing PCR primers and PCR cloning are generally known in the art and are disclosed in Sambrook, et al., (1989) Molecular Cloning: A Laboratory Manual (2d ed., Cold Spring Harbor Laboratory Press, Plainview, N.Y.), hereinafter “Sambrook”. See also, Innis, et al., eds. (1990) PCR Protocols: A Guide to Methods and Applications (Academic Press, New York); Innis and Gelfand, eds. (1995) PCR Strategies (Academic Press, New York); and Innis and Gelfand, eds. (1999) PCR Methods Manual (Academic Press, New York). Known methods of PCR include, but are not limited to, methods using paired primers, nested primers, single specific primers, degenerate primers, gene-specific primers, vector-specific primers, partially-mismatched primers, and the like. To identify potential PtIP-83 polypeptides from fern or moss collections, the fern or moss cell lysates can be screened with antibodies generated against a PtIP-83 polypeptides and/or PtIP-83 polypeptides using Western blotting and/or ELISA methods. This type of assays can be performed in a high throughput fashion. Positive samples can be further analyzed by various techniques such as antibody based protein purification and identification. Methods of generating antibodies are well known in the art as discussed infra.

[0110] Alternatively, mass spectrometry based protein identification method can be used to identify homologs of PtIP-83 polypeptides using protocols in the literatures (Scott Patterson, (1998), 10.22, 1-24, Current Protocol in Molecular Biology published by John Wiley & Son Inc). Specifically, LC-MS/MS based protein identification method is used to associate the MS data of given cell lysate or desired molecular weight enriched samples (excised from SDS-PAGE gel of relevant molecular weight bands to PtIP-83 polypeptides) with sequence information of PtIP-83 polypeptides SEQ ID NO: 1, SEQ ID NO: 3, SEQ ID NO: 5, SEQ ID NO: 7, SEQ ID NO: 9, SEQ ID NO: 11, SEQ ID NO: 13, SEQ ID NO: 15, SEQ ID NO: 17, SEQ ID NO: 19, SEQ ID NO: 21, SEQ ID NO: 23, SEQ ID NO: 716, SEQ ID NO: 754, SEQ ID NO: 755, SEQ ID NO: 756, SEQ ID NO: 757, SEQ ID NO: 758, SEQ ID NO: 759, SEQ ID NO: 760, SEQ ID NO: 761, SEQ ID NO: 762, SEQ ID NO: 763, SEQ ID NO: 764, SEQ ID NO: 765, SEQ ID NO: 766, SEQ ID NO: 767, SEQ ID NO: 768 or SEQ ID NO: 769 and their homologs. Any match in peptide sequences indicates the potential of having the homologous proteins in the samples. Additional techniques (protein purification and molecular biology) can be used to isolate the protein and identify the sequences of the homologs.

[0111] In hybridization methods, all or part of the pesticidal nucleic acid sequence can be used to screen cDNA or genomic libraries. Methods for construction of such cDNA and genomic libraries are generally known in the art and are disclosed in Sambrook and Russell, (2001), supra. The so-called hybridization probes may be genomic DNA fragments, cDNA fragments, RNA fragments or other oligonucleotides and may be labeled with a detectable group such as 32P or any other detectable marker, such as other radioisotopes, a fluorescent compound, an enzyme or an enzyme co-factor. Probes for hybridization can be made by labeling synthetic oligonucleotides based on the known PtIP-83 polypeptide-encoding nucleic acid sequence disclosed herein. Degenerate primers designed on the basis of conserved nucleotides or amino acid residues in the nucleic acid sequence or encoded amino acid sequence can additionally be used. The probe typically comprises a region of nucleic acid sequence that hybridizes under stringent conditions to at least about 12, at least about 25, at least about 50, 75, 100, 125, 150, 175 or 200 consecutive nucleotides of nucleic acid sequence encoding a PtIP-83 polypeptide of the disclosure or a fragment or variant thereof. Methods for the preparation of probes for hybridization are generally known in the art and are disclosed in Sambrook and Russell, (2001), supra, herein incorporated by reference.

[0112] For example, an entire nucleic acid sequence, encoding a PtIP-83 polypeptide, disclosed herein or one or more portions thereof may be used as a probe capable of specifically hybridizing to corresponding nucleic acid sequences encoding PtIP-83 polypeptide-like sequences and messenger RNAs. To achieve specific hybridization under a variety of conditions, such probes include sequences that are unique and are preferably at least about 10 nucleotides in length or at least about 20 nucleotides in length. Such probes may be used to amplify corresponding pesticidal sequences from a chosen organism by PCR. This technique may be used to isolate additional coding sequences from a desired organism or as a diagnostic assay to determine the presence of coding sequences in an organism. Hybridization techniques include hybridization screening of plated DNA libraries (either plaques or colonies; see, for example, Sambrook, et al., (1989) Molecular Cloning: A Laboratory Manual (2d ed., Cold Spring Harbor Laboratory Press, Cold Spring Harbor, N.Y.).

[0113] Hybridization of such sequences may be carried out under stringent conditions. “Stringent conditions” or “stringent hybridization conditions” is used herein to refer to conditions under which a probe will hybridize to its target sequence to a detectably greater degree than to other sequences (e.g., at least 2-fold over background). Stringent conditions are sequence-dependent and will be different in different circumstances. By controlling the stringency of the hybridization and/or washing conditions, target sequences that are 100% complementary to the probe can be identified (homologous probing). Alternatively, stringency conditions can be adjusted to allow some mismatching in sequences so that lower degrees of similarity are detected (heterologous probing). Generally, a probe is less than about 1000 nucleotides in length, preferably less than 500 nucleotides in length.

[0114] Typically, stringent conditions will be those in which the salt concentration is less than about 1.5 M Na ion, typically about 0.01 to 1.0 M Na ion concentration (or other salts) at pH 7.0 to 8.3 and the temperature is at least about 30° C. for short probes (e.g., 10 to 50 nucleotides) and at least about 60° C. for long probes (e.g., greater than 50 nucleotides). Stringent conditions may also be achieved with the addition of destabilizing agents such as formamide. Exemplary low stringency conditions include hybridization with a buffer solution of 30 to 35% formamide, 1 M NaCl, 1% SDS (sodium dodecyl sulphate) at 37° C., and a wash in 1× to 2×SSC (20×SSC=3.0 M NaCl/0.3 M trisodium citrate) at 50 to 55° C. Exemplary moderate stringency conditions include hybridization in 40 to 45% formamide, 1.0 M NaCl, 1% SDS at 37° C., and a wash in 0.5× to 1×SSC at 55 to 60° C. Exemplary high stringency conditions include hybridization in 50% formamide, 1 M NaCl, 1% SDS at 37° C., and a wash in 0.1×SSC at 60 to 65° C. Optionally, wash buffers may comprise about 0.1% to about 1% SDS. Duration of hybridization is generally less than about 24 hours, usually about 4 to about 12 hours.

[0115] Specificity is typically the function of post-hybridization washes, the critical factors being the ionic strength and temperature of the final wash solution. For DNA-DNA hybrids, the Tm can be approximated from the equation of Meinkoth and Wahl, (1984) Anal. Biochem. 138:267-284: Tm=81.5° C.+16.6 (log M)+0.41 (% GC)-0.61 (% form)-500/L; where M is the molarity of monovalent cations, % GC is the percentage of guanosine and cytosine nucleotides in the DNA, % form is the percentage of formamide in the hybridization solution, and L is the length of the hybrid in base pairs. The Tm is the temperature (under defined ionic strength and pH) at which 50% of a complementary target sequence hybridizes to a perfectly matched probe. Tm is reduced by about 1° C. for each 1% of mismatching; thus, Tm, hybridization, and/or wash conditions can be adjusted to hybridize to sequences of the desired identity. For example, if sequences with 90% identity are sought, the Tm can be decreased 10° C. Generally, stringent conditions are selected to be about 5° C. lower than the thermal melting point (Tm) for the specific sequence and its complement at a defined ionic strength and pH. However, severely stringent conditions can utilize a hybridization and/or wash at 1, 2, 3 or 4° C. lower than the thermal melting point (Tm); moderately stringent conditions can utilize a hybridization and/or wash at 6, 7, 8, 9 or 10° C. lower than the thermal melting point (Tm); low stringency conditions can utilize a hybridization and/or wash at 11, 12, 13, 14, 15 or 20° C. lower than the thermal melting point (Tm). Using the equation, hybridization and wash compositions, and desired Tm, those of ordinary skill will understand that variations in the stringency of hybridization and/or wash solutions are inherently described. If the desired degree of mismatching results in a Tm of less than 45° C. (aqueous solution) or 32° C. (formamide solution), it is preferred to increase the SSC concentration so that a higher temperature can be used. An extensive guide to the hybridization of nucleic acids is found in Tijssen, (1993) Laboratory Techniques in Biochemistry and Molecular Biology-Hybridization with Nucleic Acid Probes, Part I, Chapter 2 (Elsevier, N.Y.); and Ausubel, et al., eds. (1995) Current Protocols in Molecular Biology, Chapter 2 (Greene Publishing and Wiley-Interscience, New York). See, Sambrook, et al., (1989) Molecular Cloning: A Laboratory Manual (2d ed., Cold Spring Harbor Laboratory Press, Cold Spring Harbor, N.Y.).

[0116] In some embodiments polynucleotides are provided encoding a PtIP-83 polypeptide comprising an amino acid sequence having at least 80%, at least 85%, at least 90%, at least 95%, at least 96%, at least 97%, at least 98% or at least 99% sequence identity to any one of SEQ ID NO: 786-888.

[0117] In some embodiments polynucleotides are provided encoding a PtIP-83 polypeptide comprising the amino acid sequence of any one of SEQ ID NO: 786-888.

[0118] In some embodiments the polynucleotide encoding the PtIP-83 polypeptide comprising the amino acid sequence of any one of SEQ ID NO: 786-888 is a non-genomic sequence.

[0119] In some embodiments the polynucleotide encoding the PtIP-83 polypeptide comprising the amino acid sequence of any one of SEQ ID NO: 786-888 is a cDNA.

### Proteins and Variants and Fragments Thereof

[0120] PtIP-83 polypeptides are also encompassed by the disclosure. “Pteridophyta Insecticidal Protein-83” PtIP-83 polypeptide”, and “PtIP-83 protein” as used herein interchangeably refers to a polypeptide having insecticidal activity including but not limited to insecticidal activity against one or more insect pests of the Lepidoptera and/or Coleoptera orders, and is sufficiently homologous to the protein of SEQ ID NO: 1. A variety of PtIP-83 polypeptides are contemplated. Sources of PtIP-83 polypeptides or related proteins are fern species selected from but not limited to Polypodium punctatum, Lygodium flexuosum, Microsorum musifolium, Adiantum peruvianum, Adiantum trapeziforme and Adiantum pedatum.

[0121] “Sufficiently homologous” is used herein to refer to an amino acid sequence that has at least about 40%, 45%, 50%, 51%, 52%, 53%, 54%, 55%, 56%, 57%, 58%, 59%, 60%, 61%, 62%, 63%, 64%, 65%, 66%, 67%, 68%, 69%, 70%, 71%, 72%, 73%, 74%, 75%, 76%, 77%, 78%, 79%, 80%, 81%, 82%, 83%, 84%, 85%, 86%, 87%, 88%, 89%, 90%, 91%, 92%, 93%, 94%, 95%, 96%, 97%, 98%, 99% or greater sequence homology compared to a reference sequence using one of the alignment programs described herein using standard parameters. In some embodiments the sequence homology is against the full length sequence of a PtIP-83 polypeptide. In some embodiments the PtIP-83 polypeptide has at least about 40%, 45%, 50%, 51%, 52%, 53%, 54%, 55%, 56%, 57%, 58%, 59%, 60%, 61%, 62%, 63%, 64%, 65%, 66%, 67%, 68%, 69%, 70%, 71%, 72%, 73%, 74%, 75%, 76%, 77%, 78%, 79%, 80%, 81%, 82%, 83%, 84%, 85%, 86%, 87%, 88%, 89%, 90%, 91%, 92%, 93%, 94%, 95%, 96%, 97%, 98%, 99% or greater sequence identity compared to SEQ ID NO: 1. One of skill in the art will recognize that these values can be appropriately adjusted to determine corresponding homology of proteins taking into account amino acid similarity and the like.

[0122] As used herein, the terms “protein,” “peptide molecule,” or “polypeptide” includes any molecule that comprises five or more amino acids. It is well known in the art that protein, peptide or polypeptide molecules may undergo modification, including post-translational modifications, such as, but not limited to, disulfide bond formation, glycosylation, phosphorylation or oligomerization. Thus, as used herein, the terms “protein,” “peptide molecule” or “polypeptide” includes any protein that is modified by any biological or non-biological process. The terms “amino acid” and “amino acids” refer to all naturally occurring L-amino acids.

[0123] A “recombinant protein” or “recombinant polypeptide” is used herein to refer to a protein that is no longer in its natural environment, for example in vitro or in a recombinant bacterial or plant host cell. A “purified protein” or “purified polypeptide” is used herein to refer to a protein that is substantially free of cellular material. A PtIP-83 polypeptide that is substantially free of cellular material includes preparations of protein having less than about 30%, 20%, 10% or 5% (by dry weight) of non-pesticidal protein (also referred to herein as a “contaminating protein”).

[0124] “Fragments” or “biologically active portions” include polypeptide fragments comprising amino acid sequences sufficiently identical to a PtIP-83 polypeptide and that exhibit insecticidal activity. “Fragments” or “biologically active portions” of PtIP-83 polypeptides includes fragments comprising amino acid sequences sufficiently identical to the amino acid sequence set forth in SEQ ID NO: 1, SEQ ID NO: 3, SEQ ID NO: 5, SEQ ID NO: 7, SEQ ID NO: 9, SEQ ID NO: 11, SEQ ID NO: 13, SEQ ID NO: 15, SEQ ID NO: 17, SEQ ID NO: 19, SEQ ID NO: 21, SEQ ID NO: 23, SEQ ID NO: 716, SEQ ID NO: 754, SEQ ID NO: 755, SEQ ID NO: 756, SEQ ID NO: 757, SEQ ID NO: 758, SEQ ID NO: 759, SEQ ID NO: 760, SEQ ID NO: 761, SEQ ID NO: 762, SEQ ID NO: 763, SEQ ID NO: 764, SEQ ID NO: 765, SEQ ID NO: 766, SEQ ID NO: 767, SEQ ID NO: 768, SEQ ID NO: 769, or SEQ ID NOs: 958-1026, wherein the PtIP-83 polypeptide has insecticidal activity. Such biologically active portions can be prepared by recombinant techniques and evaluated for insecticidal activity. In some embodiments, the PtIP-83 polypeptide fragment is an N-terminal and/or a C-terminal truncation of at least about 1, 2, 3, 4, 5, 6, 7, 8, 9, 10, 11, 12, 13, 14, 15, 16, 17, 18, 19, 20, 25, 26, 27, 28, 29, 30, 31, 32, 33, 34 or more amino acids from the N-terminus and/or C-terminus relative to SEQ ID NO: 1, SEQ ID NO: 3, SEQ ID NO: 5, SEQ ID NO: 7, SEQ ID NO: 9, SEQ ID NO: 11, SEQ ID NO: 13, SEQ ID NO: 15, SEQ ID NO: 17, SEQ ID NO: 19, SEQ ID NO: 21, SEQ ID NO: 23, SEQ ID NO: 716, SEQ ID NO: 754, SEQ ID NO: 755, SEQ ID NO: 756, SEQ ID NO: 757, SEQ ID NO: 758, SEQ ID NO: 759, SEQ ID NO: 760, SEQ ID NO: 761, SEQ ID NO: 762, SEQ ID NO: 763,

[0125] SEQ ID NO: 764, SEQ ID NO: 765, SEQ ID NO: 766, SEQ ID NO: 767, SEQ ID NO: 768 or SEQ ID NO: 769, e.g., by proteolysis, by insertion of a start codon, by deletion of the codons encoding the deleted amino acids and concomitant insertion of a start codon, and/or insertion of a stop codon.

[0126] In some embodiments, the PtP-83 polypeptide fragments encompassed herein result from the removal of the N-terminal 1, 2, 3, 4, 5, 6, 7, 8, 9 or 10 or more amino acids relative to SEQ ID NO: 1, SEQ ID NO: 3, SEQ ID NO: 5, SEQ ID NO: 7, SEQ ID NO: 9, SEQ ID NO: 11, SEQ ID NO: 13, SEQ ID NO: 15, SEQ ID NO: 17, SEQ ID NO: 19, SEQ ID NO: 21, SEQ ID NO: 23, SEQ ID NO: 716, SEQ ID NO: 754, SEQ ID NO: 755, SEQ ID NO: 756, SEQ ID NO: 757, SEQ ID NO: 758, SEQ ID NO: 759, SEQ ID NO: 760, SEQ ID NO: 761, SEQ ID NO: 762, SEQ ID NO: 763, SEQ ID NO: 764, SEQ ID NO: 765, SEQ ID NO: 766, SEQ ID NO: 767, SEQ ID NO: 768, SEQ ID NO: 769, SEQ ID NOs: 958-1026, or variants thereof, e.g., by proteolysis or by insertion of a start codon, by deletion of the codons encoding the deleted amino acids and concomitant insertion of a start codon.

[0127] “Variants” as used herein refers to proteins or polypeptides having an amino acid sequence that is at least about 50%, 55%, 60%, 65%, 70%, 75%, 80%, 81%, 82%, 83%, 84%, 85%, 86%, 87%, 88%, 89%, 90%, 91%, 92%, 93%, 94%, 95%, 96%, 97%, 98% or 99% identical to the parental amino acid sequence.

[0128] In some embodiments a PtIP-83 polypeptide comprises an amino acid sequence having at least 40%, 45%, 50%, 51%, 52%, 53%, 54%, 55%, 56%, 57%, 58%, 59%, 60%, 61%, 62%, 63%, 64%, 65%, 66%, 67%, 68%, 69%, 70%, 71%, 72%, 73%, 74%, 75%, 76%, 77%, 78%, 79%, 80%, 81%, 82%, 83%, 84%, 85%, 86%, 87%, 88%, 89%, 90%, 91%, 92%, 93%, 94%, 95%, 96%, 97%, 98% or 99% identity to the amino acid sequence of SEQ ID NO: 1, SEQ ID NO: 3, SEQ ID NO: 5, SEQ ID NO: 7, SEQ ID NO: 9, SEQ ID NO: 11, SEQ ID NO: 13, SEQ ID NO: 15, SEQ ID NO: 17, SEQ ID NO: 19, SEQ ID NO: 21, SEQ ID NO: 23, SEQ ID NO: 716, SEQ ID NO: 754, SEQ ID NO: 755, SEQ ID NO: 756, SEQ ID NO: 757, SEQ ID NO: 758, SEQ ID NO: 759, SEQ ID NO: 760, SEQ ID NO: 761, SEQ ID NO: 762, SEQ ID NO: 763, SEQ ID NO: 764, SEQ ID NO: 765, SEQ ID NO: 766, SEQ ID NO: 767, SEQ ID NO: 768, SEQ ID NO: 769, or SEQ ID NOs: 958-1026, wherein the PtIP-83 polypeptide has insecticidal activity.

[0129] In some embodiments a PtIP-83 polypeptide comprises an amino acid sequence having at least about 80%, 81%, 82%, 83%, 84%, 85%, 86%, 87%, 88%, 89%, 90%, 91%, 92%, 93%, 94%, 95%, 96%, 97%, 98% or 99% identity across the entire length of the amino acid sequence of SEQ ID NO: 1, SEQ ID NO: 3, SEQ ID NO: 5, SEQ ID NO: 7, SEQ ID NO: 9, SEQ ID NO: 11, SEQ ID NO: 13, SEQ ID NO: 15, SEQ ID NO: 17, SEQ ID NO: 19, SEQ ID NO: 21, SEQ ID NO: 23, SEQ ID NO: 716, SEQ ID NO: 754, SEQ ID NO: 755, SEQ ID NO: 756, SEQ ID NO: 757, SEQ ID NO: 758, SEQ ID NO: 759, SEQ ID NO: 760, SEQ ID NO: 761, SEQ ID NO: 762, SEQ ID NO: 763, SEQ ID NO: 764, SEQ ID NO: 765, SEQ ID NO: 766, SEQ ID NO: 767, SEQ ID NO: 768, SEQ ID NO: 769 or SEQ ID NOs: 958-1026.

[0130] In some embodiments a PtIP-83 polypeptide comprises an amino acid sequence having at least about 80%, 81%, 82%, 83%, 84%, 85%, 86%, 87%, 88%, 89%, 90%, 91%, 92%, 93%, 94%, 95%, 96%, 97%, 98% or 99% identity across the entire length of the amino acid sequence of SEQ ID NO: 1, SEQ ID NO: 3, SEQ ID NO: 5, SEQ ID NO: 7, SEQ ID NO: 9, SEQ ID NO: 11, SEQ ID NO: 13, SEQ ID NO: 15, SEQ ID NO: 17, SEQ ID NO: 19, SEQ ID NO: 21, SEQ ID NO: 23, SEQ ID NO: 716, SEQ ID NO: 754, SEQ ID NO: 755, SEQ ID NO: 756, SEQ ID NO: 757, SEQ ID NO: 758, SEQ ID NO: 759, SEQ ID NO: 760, SEQ ID NO: 761, SEQ ID NO: 762, SEQ ID NO: 763, SEQ ID NO: 764, SEQ ID NO: 765, SEQ ID NO: 766, SEQ ID NO: 767, SEQ ID NO: 768, SEQ ID NO: 769, or SEQ ID NOs: 958-1026, and has at least one amino acid substitution, deletion, insertion, and/or addition at the N-terminus or C-terminus compared to the native sequence of SEQ ID NO: 1, SEQ ID NO: 3, SEQ ID NO: 5, SEQ ID NO: 7, SEQ ID NO: 9, SEQ ID NO: 11, SEQ ID NO: 13, SEQ ID NO: 15, SEQ ID NO: 17, SEQ ID NO: 19, SEQ ID NO: 21, SEQ ID NO: 23, SEQ ID NO: 716, SEQ ID NO: 754, SEQ ID NO: 755, SEQ ID NO: 756, SEQ ID NO: 757, SEQ ID NO: 758, SEQ ID NO: 759, SEQ ID NO: 760, SEQ ID NO: 761, SEQ ID NO: 762, SEQ ID NO: 763, SEQ ID NO: 764, SEQ ID NO: 765, SEQ ID NO: 766, SEQ ID NO: 767, SEQ ID NO: 768, SEQ ID NO: 769 or SEQ ID NOs: 958-1026.

[0131] In some embodiments a PtIP-83 polypeptide comprises an amino acid sequence of SEQ ID NO: 1, SEQ ID NO: 3, SEQ ID NO: 5, SEQ ID NO: 7, SEQ ID NO: 9, SEQ ID NO: 11, SEQ ID NO: 13, SEQ ID NO: 15, SEQ ID NO: 17, SEQ ID NO: 19, SEQ ID NO: 21, SEQ ID NO: 23, SEQ ID NO: 716, SEQ ID NO: 754, SEQ ID NO: 755, SEQ ID NO: 756, SEQ ID NO: 757, SEQ ID NO: 758, SEQ ID NO: 759, SEQ ID NO: 760, SEQ ID NO: 761, SEQ ID NO: 762, SEQ ID NO: 763, SEQ ID NO: 764, SEQ ID NO: 765, SEQ ID NO: 766, SEQ ID NO: 767, SEQ ID NO: 768, SEQ ID NO: 769, or SEQ ID NOs: 958-1026, having 1, 2, 3, 4, 5, 6, 7, 8, 9, 10 11, 12, 13, 14, 15, 16, 17, 18, 19, 20, 21, 22, 23, 24, 25, 26, 27, 28, 29, 30, 31, 32, 33, 34, 35, 36, 37, 38, 39, 40, 41, 42, 43, 44, 45, 46, 47, 48, 49, 50, 51, 52, 53, 54, 55, 56, 57, 58, 59, 60, 61, 62, 63, 64, 65, 66, 67, 68, 69, 70 or more amino acid substitutions compared to the native amino acid at the corresponding position of SEQ ID NO: 1, SEQ ID NO: 3, SEQ ID NO: 5, SEQ ID NO: 7, SEQ ID NO: 9, SEQ ID NO: 11, SEQ ID NO: 13, SEQ ID NO: 15, SEQ ID NO: 17, SEQ ID NO: 19, SEQ ID NO: 21, SEQ ID NO: 23, SEQ ID NO: 716, SEQ ID NO: 754, SEQ ID NO: 755, SEQ ID NO: 756, SEQ ID NO: 757, SEQ ID NO: 758, SEQ ID NO: 759, SEQ ID NO: 760, SEQ ID NO: 761, SEQ ID NO: 762, SEQ ID NO: 763, SEQ ID NO: 764, SEQ ID NO: 765, SEQ ID NO: 766, SEQ ID NO: 767, SEQ ID NO: 768, SEQ ID NO: 769, or SEQ ID NOs: 958-1026.

[0132] In some embodiments a PtIP-83 polypeptide comprises an amino acid sequence having 1, 2, 3, 4, 5, 6, 7, 8, 9, 10 11, 12, 13, 14, 15, 16, 17, 18, 19, 20, 21, 22, 23, 24, 25, 26, 27, 28, 29, 30, 31, 32, 33, 34, 35, 36, 37, 38, 39, 40, 41, 42, 43, 44, 45, 46, 47, 48, 49, 50, 51, 52, 53, 54, 55, 56, 57, 58, 59 or 60 amino acid substitutions, in any combination, compared to the native amino acid at the corresponding position of SEQ ID NO: 1, SEQ ID NO: 3, SEQ ID NO: 5, SEQ ID NO: 7, SEQ ID NO: 9, SEQ ID NO: 11, SEQ ID NO: 13, SEQ ID NO: 15, SEQ ID NO: 17, SEQ ID NO: 19, SEQ ID NO: 21, SEQ ID NO: 23, SEQ ID NO: 716, SEQ ID NO: 754, SEQ ID NO: 755, SEQ ID NO: 756, SEQ ID NO: 757, SEQ ID NO: 758, SEQ ID NO: 759, SEQ ID NO: 760, SEQ ID NO: 761, SEQ ID NO: 762, SEQ ID NO: 763, SEQ ID NO: 764, SEQ ID NO: 765, SEQ ID NO: 766, SEQ ID NO: 767, SEQ ID NO: 768, SEQ ID NO: 769, or SEQ ID NOs: 958-1026.

[0133] In some embodiments a PtIP-83 polypeptide comprises an amino acid sequence having 1, 2, 3, 4, 5, 6, 7, 8, 9, 10 11, 12, 13, 14, 15, 16, 17, 18, 19, 20, 21, 22, 23, 24, 25, 26, 27, 28 or 29 amino acid substitutions, in any combination, compared to the native amino acid at the corresponding position of SEQ ID NO: 1, SEQ ID NO: 3, SEQ ID NO: 5, SEQ ID NO: 7, SEQ ID NO: 9, SEQ ID NO: 11, SEQ ID NO: 13, SEQ ID NO: 15, SEQ ID NO: 17, SEQ ID NO: 19, SEQ ID NO: 21, SEQ ID NO: 23, SEQ ID NO: 716, SEQ ID NO: 754, SEQ ID NO: 755, SEQ ID NO: 756, SEQ ID NO: 757, SEQ ID NO: 758, SEQ ID NO: 759, SEQ ID NO: 760, SEQ ID NO: 761, SEQ ID NO: 762, SEQ ID NO: 763, SEQ ID NO: 764, SEQ ID NO: 765, SEQ ID NO: 766, SEQ ID NO: 767, SEQ ID NO: 768, SEQ ID NO: 769, or SEQ ID NOs: 958-1026.

[0134] In some embodiments the PtIP-83 polypeptide comprises an amino acid sequence of SEQ ID NO: 1, SEQ ID NO: 3, SEQ ID NO: 5, SEQ ID NO: 7, SEQ ID NO: 9, SEQ ID NO: 11, SEQ ID NO: 13, SEQ ID NO: 15, SEQ ID NO: 17, SEQ ID NO: 19, SEQ ID NO: 21, SEQ ID NO: 23, SEQ ID NO: 716, SEQ ID NO: 754, SEQ ID NO: 755, SEQ ID NO: 756, SEQ ID NO: 757, SEQ ID NO: 758, SEQ ID NO: 759, SEQ ID NO: 760, SEQ ID NO: 761, SEQ ID NO: 762, SEQ ID NO: 763, SEQ ID NO: 764, SEQ ID NO: 765, SEQ ID NO: 766, SEQ ID NO: 767, SEQ ID NO: 768, SEQ ID NO: 769, or SEQ ID NOs: 958-1026.

[0135] In some embodiments the PtIP-83 polypeptide comprises a non-naturally occurring amino acid sequence. As used herein the term “non-naturally occurring amino acid sequence” means an amino acid sequence not found in nature.

[0136] In some embodiments the PtIP-83 polypeptide is not the polypeptide of SEQ ID NO: 1, SEQ ID NO: 3, SEQ ID NO: 5, SEQ ID NO: 7, SEQ ID NO: 9, SEQ ID NO: 11, SEQ ID NO: 13, SEQ ID NO: 15, SEQ ID NO: 17, SEQ ID NO: 19, SEQ ID NO: 21, SEQ ID NO: 23, SEQ ID NO: 716, SEQ ID NO: 754, SEQ ID NO: 755, SEQ ID NO: 756, SEQ ID NO: 757, SEQ ID NO: 758, SEQ ID NO: 759, SEQ ID NO: 760, SEQ ID NO: 761, SEQ ID NO: 762, SEQ ID NO: 763, SEQ ID NO: 764, SEQ ID NO: 765, SEQ ID NO: 766, SEQ ID NO: 767, SEQ ID NO: 768, SEQ ID NO: 769, or SEQ ID NOs: 958-1026.

[0137] In some embodiments the PtIP-83 polypeptide is a variant of the polypeptide of SEQ ID NO: 1, SEQ ID NO: 3, SEQ ID NO: 5, SEQ ID NO: 7, SEQ ID NO: 9, SEQ ID NO: 11, SEQ ID NO: 13, SEQ ID NO: 15, SEQ ID NO: 17, SEQ ID NO: 19, SEQ ID NO: 21, SEQ ID NO: 23, SEQ ID NO: 716, SEQ ID NO: 754, SEQ ID NO: 755, SEQ ID NO: 756, SEQ ID NO: 757, SEQ ID NO: 758, SEQ ID NO: 759, SEQ ID NO: 760, SEQ ID NO: 761, SEQ ID NO: 762, SEQ ID NO: 763, SEQ ID NO: 764, SEQ ID NO: 765, SEQ ID NO: 766, SEQ ID NO: 767, SEQ ID NO: 768, SEQ ID NO: 769, or SEQ ID NOs: 958-1026, wherein the PtIP-83 polypeptide variant has at least one amino acid substitution, deletion, insertion, and/or addition at the N-terminus or C-terminus compared to SEQ ID NO: 1, SEQ ID NO: 3, SEQ ID NO: 5, SEQ ID NO: 7, SEQ ID NO: 9, SEQ ID NO: 11, SEQ ID NO: 13, SEQ ID NO: 15, SEQ ID NO: 17, SEQ ID NO: 19, SEQ ID NO: 21, SEQ ID NO: 23, SEQ ID NO: 716, SEQ ID NO: 754, SEQ ID NO: 755, SEQ ID NO: 756, SEQ ID NO: 757, SEQ ID NO: 758, SEQ ID NO: 759, SEQ ID NO: 760, SEQ ID NO: 761, SEQ ID NO: 762, SEQ ID NO: 763, SEQ ID NO: 764, SEQ ID NO: 765, SEQ ID NO: 766, SEQ ID NO: 767, SEQ ID NO: 768, SEQ ID NO: 769, or SEQ ID NOs: 958-1026.

[0138] In some embodiments PtIP-83 polypeptide comprising an amino acid sequence of any one of SEQ ID NO: 236-299, SEQ ID NO: 334-367, SEQ ID NO: 398-427, SEQ ID NO: 518-607, SEQ ID NO: 640-645, and SEQ ID NO: 728-737.

[0139] In some embodiments the PtIP-83 polypeptide is a variant of SEQ ID NO: 1, wherein the amino acid at position 53 is Val, Ala, Cys or Thr; the amino acid at position 54 is Lys, Ala, Cys, Asp, Glu, Gly, His, Ile, Leu, Met, Asn, Gln, Arg, Ser or Thr; the amino acid at position 55 is Arg, Ala, Asp, Glu, Phe, Gly, His, Lys, Leu, Met, Asn, Gln, Ser, Thr, Val, Trp or Tyr; the amino acid at position 56 is Leu, Glu, Phe, Ile, Met, Thr or Val; the amino acid at position 57 is Tyr, Cys, Ile, Leu, Met, Thr or Val; the amino acid at position 58 is Val, Cys, Ile or Leu; the amino acid at position 59 is Phe, Leu, Met, Val or Tyr; the amino acid at position 60 is Ala, Cys, Gly, Ser, Thr or Val; the amino acid at position 61 is Asp, Glu, His or Ser; the amino acid at position 62 is Val, Ala, Cys, Ile, Leu or Thr; the amino acid at position 63 is Val, Ala, Cys, Ile, Leu, Met or Thr; the amino acid at position 64 is Glu, Ala, Cys, Phe, Gly, His, Ile, Leu, Met, Asn, Gln, Arg, Ser, Thr, Val, Trp or Tyr; the amino acid at position 65 is Leu, Ala, Cys, Phe, His, Ile, Met, Asn, Gln, Thr, Val or Trp; the amino acid at position 66 is Pro, Asp, Gly, Met, Gln or Arg; the amino acid at position 363 is Gln, Ala, Cys, Glu, Phe, Gly, His, Lys, Leu, Asn, Arg, Ser, Thr, Val or Trp; the amino acid at position 364 is Ile, Ala, Cys, Glu, Phe, His, Lys, Leu, Met, Asn, Gln, Ser, Thr, Val, Trp or Tyr; the amino acid at position 365 is Leu, Ala, Glu, Phe, Gly, His, Ile, Lys, Met, Asn, Arg, Val, Trp or Tyr; the amino acid at position 366 is Gly, Ala, Cys, Phe, His, Ile, Lys, Leu, Met, Asn, Ser, Thr or Val; the amino acid at position 367 is Ser, Ala, Cys, Asp, Glu, Phe, Gly, His, Ile, Leu, Met, Asn, Pro, Gln, Arg, Thr, Val or Trp; the amino acid at position 368 is Tyr, Ala, Cys, Asp, Glu, Phe, Gly, His, Ile, Lys, Leu, Met, Asn, Pro, Gln, Arg, Ser, Thr, Val or Trp; the amino acid at position 369 is Leu, Ala, Cys, Asp, Phe, Gly, Ile, Met, Thr or Val; the amino acid at position 370 is Leu, Ala, Cys, Asp, Glu, Phe, Gly, His, Ile, Lys, Met, Gln, Arg, Ser, Thr, Val, Trp or Tyr; the amino acid at position 371 is Gln, Ala, Cys, Asp, Glu, Phe, Gly, Ile, Lys, Leu, Asn, Arg, Ser, Thr, Val or Trp; the amino acid at position 372 is Gln, Ala, Cys, Asp, Phe, Gly, His, Ile, Leu, Asn, Arg, Ser, Val or Tyr; the amino acid at position 373 is Asn, Ala, Cys, Asp, Phe, Gly, His, Ile, Lys, Gln, Ser, Thr, Val or Trp; the amino acid at position 556 is Trp, Phe, Thr or Tyr; the amino acid at position 557 is Arg, Cys, Asp, Gly, His, Ile, Lys, Leu, Met, Asn, Pro, Gln, Ser, Thr, Val, Trp or Tyr; the amino acid at position 558 is Ala, Cys, Asp, Phe, Gly, His, Ile, Lys, Leu, Asn, Pro, Gln, Arg, Ser, Val, Trp or Tyr; the amino acid at position 559 is Lys, Ala, Cys, Phe, Gly, His, Ile, Leu, Asn, Gln, Arg, Ser, Thr, Val or Tyr; the amino acid at position 560 is Cys, Ala, Phe, Gly, Ile, Met, Asn, Arg, Ser, Thr or Val; the amino acid at position 561 is Lys, Ala, Cys, Asp, Glu, Phe, Gly, His, Ile, Leu, Met, Asn, Arg, Ser, Thr, Val or Tyr; the amino acid at position 562 is Asn, Cys, Asp, Glu, Gly, His, Leu, Met, Arg, Ser, Thr, Val or Tyr; the amino acid at position 563 is Val, Ala, Cys, Asp, Phe, His, Ile, Leu, Met, Asn, Gln, Thr or Trp; the amino acid at position 564 is Ala, Cys, Gly, Met, Gln, Ser, Thr, Val, Trp or Tyr; the amino acid at position 646 is Leu, Ala, Cys, Gly, Ile, Met, Asn, Gln, Ser, Thr or Val; the amino acid at position 647 is Leu, Asp, Gly, Met, Asn, Gln or Thr; the amino acid at position 648 is Met, Ala, Cys, Asp, Glu, Phe, Gly, His, Lys, Leu, Asn, Pro, Gln, Arg, Ser, Thr, Val, Trp or Tyr; the amino acid at position 649 is Pro, Ala, Cys, Asp, Glu, Phe, Gly, His, Lys, Met, Asn, Gln, Arg, Ser, Thr, Trp or Tyr; the amino acid at position 650 is Thr, Ala, Cys, Asp, Phe, Gly, His, Ile, Lys, Leu, Met, Pro, Gln, Arg, Ser, Val or Tyr; the amino acid at position 651 is Glu, Ala, Cys, Asp, Gly, His, Ile, Leu, Met, Asn, Pro, Gln, Arg, Ser, Thr, Val or Tyr; the amino acid at position 652 is Leu, Cys, Phe, Ile, Lys, Met, Pro, Arg, Ser, Thr or Val; the amino acid at position 653 is Thr, Cys, Asp, Glu, Phe, Gly, His, Ile, Lys, Leu, Pro, Arg, Ser, Val or Trp; the amino acid at position 654 is Thr, Ala, Cys, Phe, Ile, Lys, Leu, Met, Pro, Arg, Ser, Val, Trp or Tyr; the amino acid at position 655 is Trp, Phe or Tyr; the amino acid at position 771 is Arg, Ala, Asp, Glu, Phe, Gly, His, Ile, Lys, Leu, Asn, Ser, Thr, Val, Trp or Tyr; the amino acid at position 772 is Arg, Ala, Cys, Asp, Glu, Phe, Gly, His, Ile, Lys, Leu, Met, Pro, Gln, Ser, Thr, Val, Trp or Tyr; the amino acid at position 773 is Asp, Ala, Glu, Phe, Gly, His, Ile, Lys, Leu, Met, Asn, Gln, Arg, Ser, Thr, Val, Trp or Tyr; the amino acid at position 774 is Gln, Ala, Asp, Gly, His, Ile, Lys, Leu, Met, Asn, Pro, Arg, Ser, Thr, Val, Trp or Tyr; the amino acid at position 775 is Val, Ala, Cys, Asp, Glu, Gly, His, Ile, Asn, Pro, Gln, Arg, Ser, Thr or Tyr; the amino acid at position 776 is Leu, Ala, Cys, Asp, Glu, Phe, Gly, His, Ile, Lys, Asn, Pro, Gln, Arg, Ser, Thr, Val or Tyr; the amino acid at position 777 is Pro, Ala, Cys, Asp, Glu, Phe, Gly, His, Lys, Leu, Met, Asn, Gln, Ser, Thr, Val, Trp or Tyr; the amino acid at position 778 is Phe, Ala, His, Ile, Leu, Met, Asn, Gln, Ser, Val, Trp or Tyr; the amino acid at position 779 is Gln, Ala, Cys, Asp, Glu, Gly, His, Lys, Leu, Asn, Pro, Arg, Ser, Thr or Val; the amino acid at position 780 is Ala, Cys, Asn, Pro, Gln or Ser; the amino acid at position 781 is Ala, Cys, Asp, Glu, Phe, Gly, His, Ile, Asn, Gln, Arg, Ser, Thr, Val, Trp or Tyr; the amino acid at position 782 is Ala, Cys, Asp, Glu, Phe, Gly, His, Ile, Lys, Met, Pro, Gln, Arg, Ser, Thr, Val, Trp or Tyr; the amino acid at position 783 is Pro, Ala, Cys, Asp, Glu, Gly, His, Asn, Gln, Arg, Ser, Thr or Val; the amino acid at position 784 is Leu, Ala, Glu, Phe, His, Ile, Lys, Met, Asn, Pro, Gln, Ser, Thr, Val or Trp; the amino acid at position 785 is Asn, Ala, Cys, Glu, Phe, Gly, His, Ile, Lys, Leu, Met, Gln, Arg, Ser, Thr, Val, Trp or Tyr; and the amino acid at position 786 is Tyr, Phe, Ile, Leu or Trp.

[0140] In some embodiments the PtIP-83 polypeptide is a variant of SEQ ID NO: 1, wherein the amino acid at position 1 is Met or deleted; the amino acid at position 2 is Ala or deleted; the amino acid at position 3 is Leu, Val or deleted; the amino acid at position 4 is Val, Met or Leu; the amino acid at position 7 is Gly or Ser; the amino acid at position 8 is Lys or Thr; the amino acid at position 10 is Phe or Tyr; the amino acid at position 11 is Glu or Arg; the amino acid at position 18 is Met or Ile; the amino acid at position 19 is Gly, Pro or Ala; the amino acid at position 20 is Val or deleted; the amino acid at position 21 is Leu or Val; the amino acid at position 23 is Arg or Gln; the amino acid at position 37 is Val or Leu; the amino acid at position 38 is Arg or Asn; the amino acid at position 40 is Ala or Ser; the amino acid at position 43 is Asn or Asp; the amino acid at position 45 is Gly or Ala; the amino acid at position 46 is Gln or Glu; the amino acid at position 48 is Glu, Pro or Val; the amino acid at position 51 is Glu or Gly; the amino acid at position 52 is Lys, Arg or Thr; the amino acid at position 56 is Leu or Val; the amino acid at position 59 is Phe or Leu; the amino acid at position 66 is Pro or Ala; the amino acid at position 67 is Val, Pro or Thr; the amino acid at position 68 is Val, Arg, Phe or Gly; the amino acid at position 69 is Glu, Ala or Lys; the amino acid at position 70 is Trp, Thr, His, Tyr or Arg; the amino acid at position 71 is Arg, Pro or deleted; the amino acid at position 72 is Trp, Asp, Leu or deleted; the amino acid at position 73 is Pro, Gln, Asn, His or deleted; the amino acid at position 74 is Pro, Met or Thr; the amino acid at position 75 is Gln, His or Arg; the amino acid at position 76 is Ile, Met or Leu; the amino acid at position 84 is Ile or Val; the amino acid at position 91 is Trp or Phe; the amino acid at position 93 is Thr or Ile; the amino acid at position 94 is Asp or Gly; the amino acid at position 96 is Arg or Ser; the amino acid at position 97 is Gln, Phe or Arg; the amino acid at position 98 is Ser or deleted; the amino acid at position 99 is Asp or Ala; the amino acid at position 100 is Thr or Ala; the amino acid at position 101 is Glu, Thr or Trp the amino acid at position 103 is His, Arg, Glu or Gln; the amino acid at position 105 is Thr or Pro; the amino acid at position 108 is Lys, Gln or Glu; the amino acid at position 109 is Leu or Val; the amino acid at position 111 is Ala or Thr; the amino acid at position 112 is Ile, Arg, Thr or deleted; the amino acid at position 113 is Gln, Ala, Gly or deleted; the amino acid at position 114 is Arg, Glu or Ile; the amino acid at position 115 is Glu or Gln; the amino acid at position 116 is Glu, Asn, Gln or Arg; the amino acid at position 117 is Asn, Val, Tyr or Phe; the amino acid at position 118 is Arg or Lys; the amino acid at position 119 is Trp or Ser; the amino acid at position 122 is Thr, Lys or Ala; the amino acid at position 124 is Ala or Thr; the amino acid at position 126 is Gly or Asp; the amino acid at position 127 is Met or Ala; the amino acid at position 128 is Asn or Lys; the amino acid at position 131 is Val, Ile or Thr; the amino acid at position 133 is Ile or Val; the amino acid at position 134 is His or Tyr; the amino acid at position 135 is Ala or Gly; the amino acid at position 137 is Glu or Lys; the amino acid at position 139 is Gln or Glu; the amino acid at position 140 is Val, Arg or Leu; the amino acid at position 141 is Gly or Ser; the amino acid at position 142 is Val or Pro; the amino acid at position 144 is Thr, Leu, Phe or Tyr; the amino acid at position 145 is Met, Pro or Asn; the amino acid at position 146 is Ser, Gly or Asn; the amino acid at position 147 is Trp or Asn; the amino acid at position 148 is Ser, Ala or Pro; the amino acid at position 149 is Ser or deleted; the amino acid at position 150 is Val, Ile or Tyr; the amino acid at position 152 is Arg, Ala, Val or Gly; the amino acid at position 154 is Ser, Trp or Glu; the amino acid at position 156 is Leu, Asp or Gln; the amino acid at position 158 is Ser or Cys; the amino acid at position 159 is Val, Thr or Ile; the amino acid at position 162 is Ser or Ala; the amino acid at position 163 is Gly or deleted; the amino acid at position 164 is Phe or deleted; the amino acid at position 165 is Arg or Ala; the amino acid at position 166 is Ala, Arg, Met or Phe; the amino acid at position 167 is Val or His; the amino acid at position 168 is Ser or Asn; the amino acid at position 169 is Val, His or Thr; the amino acid at position 170 is Phe or Val; the amino acid at position 171 is Glu, Asn or Asp; the amino acid at position 172 is Val, Ala, Arg or Glu; the amino acid at position 175 is Ser, Arg or Trp; the amino acid at position 176 is Val or Ile; the amino acid at position 177 is Arg or Ile; the amino acid at position 179 is Thr, Ile, Val or Ser; the amino acid at position 180 is Leu, Phe or Thr; the amino acid at position 181 is Gly, Thr, Gln or Ser; the amino acid at position 182 is Ala, Leu, Phe or Ile; the amino acid at position 183 is Thr or Gly; the amino acid at position 184 is Leu, Thr, Ser or Arg; the amino acid at position 185 is Arg, Gly, Asp or Ala; the amino acid at position 186 is Pro, Val or Gln; the amino acid at position 187 is Asp, Thr or Ser; the amino acid at position 188 is His, Gly or Ala; the amino acid at position 189 is Ala, Arg, Pro or deleted; the amino acid at position 190 is Leu, Asn or deleted; the amino acid at position 191 is Tyr or deleted; the amino acid at position 192 is Ser, Ile, Val or Asn; the amino acid at position 193 is Thr or Asp; the amino acid at position 194 is Thr or Ser; the amino acid at position 195 is Met or Thr; the amino acid at position 196 is Gln, His, Leu or Ser; the amino acid at position 197 is Ala, Gly or Leu; the amino acid at position 198 is Thr, Glu or Ala; the amino acid at position 199 is Pro or Arg; the amino acid at position 200 is Asn, Ser, Thr or Gly; the amino acid at position 201 is Ala, Leu, Glu or Trp; the amino acid at position 202 is Ser, Asp, Phe or Leu; the amino acid at position 203 is His, Pro, Gly or Ser; the amino acid at position 204 is Ile, Trp, His or Gly; the amino acid at position 205 is Ser, Asn or Ile; the amino acid at position 206 is Ala, Gly, Asp, Tyr or Arg; the amino acid at position 207 is Phe, Val or Leu; the amino acid at position 208 is Asn, Ser, Pro or Leu; the amino acid at position 210 is Arg, Asp, Glu or Tyr; the amino acid at position 211 is Ile, Ser or Thr; the amino acid at position 212 is Val, Ala or Asp; the amino acid at position 214 is Pro or Arg; the amino acid at position 215 is Ser or Thr; the amino acid at position 217 is Tyr or Phe; the amino acid at position 218 is Arg or Ser; the amino acid at position 219 is Val or Ala; the amino acid at position 220 is Cys, Leu or Ser; the amino acid at position 221 is Pro or His; the amino acid at position 222 is Leu, Arg or Ser; the amino acid at position 224 is Asn or Ser; the amino acid at position 225 is Asp, Arg or Thr; the amino acid at position 226 is Thr or Asn; the amino acid at position 227 is Asp, Leu or deleted; the amino acid at position 228 is Thr or deleted; the amino acid at position 229 is Tyr or deleted; the amino acid at position 230 is Leu or deleted; the amino acid at position 231 is Gly or deleted; the amino acid at position 232 is Ile or deleted; the amino acid at position 233 is Pro or deleted; the amino acid at position 234 is Ala, Pro or deleted; the amino acid at position 235 is Asp, Ile or Val; the amino acid at position 236 is Val, Ser or Glu; the amino acid at position 237 is Ala, Phe or Tyr; the amino acid at position 238 is Ala or Thr; the amino acid at position 239 is Val, Ser or Gly; the amino acid at position 240 is Leu or Ile; the amino acid at position 243 is Asp or Glu; the amino acid at position 249 is Asn or Ser; the amino acid at position 252 is Leu or Met; the amino acid at position 257 is Thr or Ser; the amino acid at position 259 is His or Leu; the amino acid at position 266 is Ala or Val; the amino acid at position 267 is Cys or Gly; the amino acid at position 268 is His, Arg or Tyr; the amino acid at position 272 is Asp or Glu; the amino acid at position 273 is Val, Met, Ile or Leu; the amino acid at position 274 is Val or Met; the amino acid at position 278 is Gly or Ala; the amino acid at position 279 is Glu or Val; the amino acid at position 281 is Leu or Ala; the amino acid at position 282 is Asn, Leu or Ile; the amino acid at position 285 is Asn or Ser; the amino acid at position 286 is Lys, Asp or Glu; the amino acid at position 287 is Leu or Val; the amino acid at position 290 is Pro, Gln or Arg; the amino acid at position 291 is Leu or Val; the amino acid at position 292 is Lys or Val; the amino acid at position 293 is Glu or Gln; the amino acid at position 294 is Ser, Asn or Lys; the amino acid at position 295 is Thr or Ser; the amino acid at position 296 is Gln or His; the amino acid at position 297 is Leu or Met; the amino acid at position 300 is Ser or Thr; the amino acid at position 301 is Glu or Ala; the amino acid at position 302 is Ser, Pro or Ala; the amino acid at position 304 is Lys or Asn; the amino acid at position 313 is Val or Ile; the amino acid at position 314 is His, Glu or Gln; the amino acid at position 315 is Ala, Cys or Ser; the amino acid at position 316 is Ala or Val; the amino acid at position 317 is Met or Ile; the amino acid at position 319 is Met or Ile; the amino acid at position 320 is Val or Gly; the amino acid at position 321 is Arg or Pro; the amino acid at position 322 is Ile or Phe; the amino acid at position 323 is Gly or Val; the amino acid at position 324 is Leu or Ser; the amino acid at position 336 is Ser or Asn; the amino acid at position 339 is Asn, Lys or Arg; the amino acid at position 350 is Arg or Gln; the amino acid at position 351 is Glu or Asp; the amino acid at position 353 is Lys or Arg; the amino acid at position 354 is Gln or Arg; the amino acid at position 355 is Phe or Leu; the amino acid at position 356 is Lys or Arg; the amino acid at position 360 is Ile, Val or Ala; the amino acid at position 365 is Leu or Phe; the amino acid at position 371 is or Glu; the amino acid at position 372 is or Lys; the amino acid at position 374 is Arg or Lys; the amino acid at position 376 is Phe or Leu; the amino acid at position 378 is Glu or Asp; the amino acid at position 381 is Leu or Val; the amino acid at position 388 is Ala or Ser; the amino acid at position 395 is Arg or Lys; the amino acid at position 396 is Glu, Gln or Gly; the amino acid at position 399 is Asp or Asn; the amino acid at position 400 is Asn, Thr or Asp; the amino acid at position 401 is Thr or Ala; the amino acid at position 402 is Phe, Ile or Leu; the amino acid at position 406 is Asp or Glu; the amino acid at position 408 is Leu or Met; the amino acid at position 410 is Gly or Leu; the amino acid at position 414 is Ala or Glu; the amino acid at position 416 is Ser, Asn or Asp; the amino acid at position 417 is Ser, Arg or Gly; the amino acid at position 423 is Lys or Gln; the amino acid at position 431 is Arg or Lys; the amino acid at position 432 is Gln or Glu; the amino acid at position 436 is Arg or Glu; the amino acid at position 440 is Asn or Arg; the amino acid at position 442 is Leu or Val; the amino acid at position 447 is Ser, Lys or Arg; the amino acid at position 448 is Ala or Ser; the amino acid at position 451 is Gln or Met; the amino acid at position 453 is Gly or Ala; the amino acid at position 455 is Ala or Val; the amino acid at position 457 is Leu or Val; the amino acid at position 467 is Val or Ala; the amino acid at position 471 is Gly or Ala; the amino acid at position 475 is Ser or Asn; the amino acid at position 483 is Gly or Ala; the amino acid at position 493 is Gln or Gly; the amino acid at position 504 is Val or Ile; the amino acid at position 506 is Asp or His; the amino acid at position 509 is Asp or Asn; the amino acid at position 510 is Ser or Ala; the amino acid at position 512 is Glu or Asp; the amino acid at position 515 is Gly or Ser; the amino acid at position 516 is Gln or His; the amino acid at position 517 is Ile or Leu; the amino acid at position 519 is Asp, Gly or Gln; the amino acid at position 522 is Val, Glu, Pro or Val; the amino acid at position 525 is Glu or Asp; the amino acid at position 526 is Leu or Met; the amino acid at position 539 is Val or Ile; the amino acid at position 555 is Val or Ala; the amino acid at position 557 is Arg or Lys; the amino acid at position 563 is Val or Met; the amino acid at position 571 is Ser or Cys; the amino acid at position 575 is Val or Glu; the amino acid at position 577 is Met or Ile; the amino acid at position 579 is Glu or Gln; the amino acid at position 583 is Asp or Glu; the amino acid at position 589 is Met or Leu; the amino acid at position 590 is Met or Leu; the amino acid at position 593 is Met or Ile; the amino acid at position 595 is Arg or Gln; the amino acid at position 596 is Ser or Thr; the amino acid at position 597 is Gln or His; the amino acid at position 607 is Ala or Val; the amino acid at position 608 is Asp or Asn; the amino acid at position 612 is Tyr, His or Phe; the amino acid at position 617 is Thr or Ile; the amino acid at position 618 is Gln or His; the amino acid at position 625 is Arg or Ser; the amino acid at position 626 is Met or Ile; the amino acid at position 628 is Leu or Ile; the amino acid at position 633 is Ile or Met; the amino acid at position 634 is Leu or Met; the amino acid at position 642 is Arg or Met; the amino acid at position 648 is Met or Thr; the amino acid at position 651 is Glu or Gln; the amino acid at position 654 is Thr, Val or Ala; the amino acid at position 658 is Gly or Arg; the amino acid at position 663 is Gly or Ala; the amino acid at position 664 is Asp or Asn; the amino acid at position 668 is Ala or Thr; the amino acid at position 669 is Gln or His; the amino acid at position 671 is Asn or Ser the amino acid at position 675 is Ile, Val or Ser; the amino acid at position 678 is Met, Ile, Ala or Thr; the amino acid at position 682 is Pro or Gln; the amino acid at position 683 is Ser or Pro; the amino acid at position 685 is Asp or Asn; the amino acid at position 694 is Asp or Gly; the amino acid at position 697 is Asn or Ser; the amino acid at position 704 is Glu or Gly; the amino acid at position 714 is Ala or Gly; the amino acid at position 721 is Ser or Phe; the amino acid at position 722 is Ser or Asn; the amino acid at position 724 is Ser or Thr; the amino acid at position 734 is His or Gln; the amino acid at position 736 is Val or Ala; the amino acid at position 737 is Lys or Gln; the amino acid at position 739 is Ala or Ser; the amino acid at position 740 is Ser or Met; the amino acid at position 741 is Gly or Asn; the amino acid at position 742 is Ile or Gly; the amino acid at position 743 is Gly or deleted; the amino acid at position 745 is Gly or Asp; the amino acid at position 751 is Thr, Ser or Ala; the amino acid at position 753 is Gln or Arg; the amino acid at position 754 is Thr or Ser; the amino acid at position 756 is Thr or Ile; the amino acid at position 757 is Val or Ile; the amino acid at position 766 is Ile or Val; the amino acid at position 773 is Asp or Glu; the amino acid at position 774 is Gln or Glu; the amino acid at position 776 is Leu or Met; the amino acid at position 777 is Pro or Thr; the amino acid at position 782 is Ala, Asp or Val; the amino acid at position 786 is Tyr or Phe; the amino acid at position 787 is His or Gln; the amino acid at position 788 is Tyr or Met; the amino acid at position 789 is Ala or Arg; the amino acid at position 790 is Tyr or Thr; the amino acid at position 791 is Arg or Ala; the amino acid at position 792 is Leu or Ser; the amino acid at position 796 is Asp or Glu; the amino acid at position 797 is Ser, Thr or Ala the amino acid at position 802 is Glu or Gln; the amino acid at position 806 is Gln, Asp, Glu or His; the amino acid at position 810 is Lys or Thr; the amino acid at position 819 is Arg or His; the amino acid at position 829 is Lys, Ser, Ala or Pro; the amino acid at position 832 is Ala, Lys or Glu; the amino acid at position 833 is Gly or Glu; the amino acid at position 842 is Leu or Pro; the amino acid at position 847 is Gln or Glu; the amino acid at position 848 is Ile or Val; the amino acid at position 849 is Val or Ala; the amino acid at position 855 is Thr or Met; the amino acid at position 860 is Ile or Val; and the amino acid at position 864 is His or Gln.

[0141] In some embodiments the PtIP-83 polypeptide is a variant of SEQ ID NO: 1, wherein the amino acid at position 1 is Met or deleted; the amino acid at position 2 is Ala or deleted; the amino acid at position 3 is Leu, Val, Ile or deleted; the amino acid at position 4 is Val, Met, Ile or Leu; the amino acid at position 7 is Gly, Thr or Ser; the amino acid at position 8 is Lys, Arg, Ser or Thr; the amino acid at position 10 is Phe, Trp or Tyr; the amino acid at position 11 is Glu, Asp, Lys or Arg; the amino acid at position 18 is Met, Val, Leu or Ile; the amino acid at position 19 is Gly, Pro or Ala; the amino acid at position 20 is Val, Ile, Leu or deleted; the amino acid at position 21 is Leu, Ile or Val; the amino acid at position 23 is Arg, Lys, Asn or Gln; the amino acid at position 37 is Val, Ile or Leu; the amino acid at position 38 is Arg, Lys, Gln or Asn; the amino acid at position 40 is Ala, Gly, Thr or Ser; the amino acid at position 43 is Asn, Gln, Glu or Asp; the amino acid at position 45 is Gly or Ala; the amino acid at position 46 is Gln, Asp, Asn or Glu; the amino acid at position 48 is Glu, Asp, Pro, Ile, Leu or Val; the amino acid at position 51 is Glu, Asp, Ala or Gly; the amino acid at position 52 is Lys, Arg, Ser or Thr; the amino acid at position 56 is Leu, Ile or Val; the amino acid at position 59 is Phe, Ile, Val or Leu; the amino acid at position 66 is Pro, Gly or Ala; the amino acid at position 67 is Val, Pro, Ile, Leu, Ser or Thr; the amino acid at position 68 is Val, Arg, Phe, Ile, Leu, Lys or Gly; the amino acid at position 69 is Glu, Ala, Asp, Gly, Arg or Lys; the amino acid at position 70 is Trp, Thr, His, Tyr, Lys or Arg; the amino acid at position 71 is Arg, Pro, Lys or deleted; the amino acid at position 72 is Trp, Asp, Leu, Ile, Val, Glu or deleted; the amino acid at position 73 is Pro, Gln, Asn, His or deleted; the amino acid at position 74 is Pro, Met, Ser or Thr; the amino acid at position 75 is Gln, His, Asn, Lys or Arg; the amino acid at position 76 is Ile, Met, Val or Leu; the amino acid at position 84 is Ile, Leu or Val; the amino acid at position 91 is Trp or Phe; the amino acid at position 93 is Thr, Ser, Leu, Val or Ile; the amino acid at position 94 is Asp, Glu, Ala or Gly; the amino acid at position 96 is Arg, Lys, Thr or Ser; the amino acid at position 97 is Gln, Phe, Asn, Lys or Arg; the amino acid at position 98 is Ser, Thr or deleted; the amino acid at position 99 is Asp, Glu, Gly or Ala; the amino acid at position 100 is Thr, Ser, Gly or Ala; the amino acid at position 101 is Glu, Thr, Asp, Ser or Trp the amino acid at position 103 is His, Arg, Lys, Glu or Gln; the amino acid at position 105 is Thr, Ser or Pro; the amino acid at position 108 is Lys, Arg, Asn, Asp, Gln or Glu; the amino acid at position 109 is Leu, Ile or Val; the amino acid at position 111 is Ala, Ser or Thr; the amino acid at position 112 is Ile, Arg, Thr, Leu, Val, Lys, Ser or deleted; the amino acid at position 113 is Gln, Ala, Gly, Asn or deleted; the amino acid at position 114 is Arg, Glu, Lys, Asp or Ile; the amino acid at position 115 is Glu, Asp, Asn or Gln; the amino acid at position 116 is Glu, Asn, Gln, Asp, Lys or Arg; the amino acid at position 117 is Asn, Val, Tyr, Ile, Leu, Gln, Trp or Phe; the amino acid at position 118 is Arg or Lys; the amino acid at position 119 is Trp, Thr or Ser; the amino acid at position 122 is Thr, Lys, Ser, Arg or Ala; the amino acid at position 124 is Ala, Gly, Ser or Thr; the amino acid at position 126 is Gly, Ala, Glu or Asp; the amino acid at position 127 is Met, Gly or Ala; the amino acid at position 128 is Asn, Gln, Arg or Lys; the amino acid at position 131 is Val, Ile, Leu, Ser or Thr; the amino acid at position 133 is Ile, Leu or Val; the amino acid at position 134 is His or Tyr; the amino acid at position 135 is Ala or Gly; the amino acid at position 137 is Glu, Asp, Arg or Lys; the amino acid at position 139 is Gln, Asn, Asp or Glu; the amino acid at position 140 is Val, Arg, Ile, Lys or Leu; the amino acid at position 141 is Gly, Ala, Thr or Ser; the amino acid at position 142 is Val, Ile, Leu or Pro; the amino acid at position 144 is Thr, Leu, Phe, Ile, Val or Tyr; the amino acid at position 145 is Met, Pro, Gln or Asn; the amino acid at position 146 is Ser, Gly, Thr, Ala, Gln or Asn; the amino acid at position 147 is Trp, Gln, Tyr or Asn; the amino acid at position 148 is Ser, Ala, Thr, Gly or Pro; the amino acid at position 149 is Ser, Thr or deleted; the amino acid at position 150 is Val, Ile, Leu or Tyr; the amino acid at position 152 is Arg, Ala, Val, Ile, Leu, Lys or Gly; the amino acid at position 154 is Ser, Trp, Thr, Asp or Glu; the amino acid at position 156 is Leu, Asp, Ile, Val, Asn, Glu or Gln; the amino acid at position 158 is Ser, Thr or Cys; the amino acid at position 159 is Val, Thr, Leu or Ile; the amino acid at position 162 is Ser, Thr, Gly or Ala; the amino acid at position 163 is Gly, Ala or deleted; the amino acid at position 164 is Phe or deleted; the amino acid at position 165 is Arg, Lys, Gly or Ala; the amino acid at position 166 is Ala, Arg, Met, Lys or Phe; the amino acid at position 167 is Val, Ile, Leu or His; the amino acid at position 168 is Ser, Thr, Gln or Asn; the amino acid at position 169 is Val, His, Ile, Leu, Ser or Thr; the amino acid at position 170 is Phe, Ile, Leu or Val; the amino acid at position 171 is Glu, Asn, Gln or Asp; the amino acid at position 172 is Val, Ala, Arg, Ile, Leu, Gly, Lys, Asp or Glu; the amino acid at position 175 is Ser, Arg, Thr, Lys or Trp; the amino acid at position 176 is Val, Leu or Ile; the amino acid at position 177 is Arg, Lys, Leu, Val or Ile; the amino acid at position 179 is Thr, Ile, Val, Leu or Ser; the amino acid at position 180 is Leu, Phe, Ile, Val, Ser or Thr; the amino acid at position 181 is Gly, Thr, Gln, Asn or Ser; the amino acid at position 182 is Ala, Leu, Phe, Val or Ile; the amino acid at position 183 is Thr, Ser, Ala or Gly; the amino acid at position 184 is Leu, Thr, Ser, Ile, Val, Lys or Arg; the amino acid at position 185 is Arg, Gly, Asp, Lys, Glu or Ala; the amino acid at position 186 is Pro, Val, Ile, Leu, Asn or Gln; the amino acid at position 187 is Asp, Thr, Glu or Ser; the amino acid at position 188 is His, Gly or Ala; the amino acid at position 189 is Ala, Arg, Pro, Lys, Gly or deleted; the amino acid at position 190 is Leu, Asn, Ile, Val, Gln or deleted; the amino acid at position 191 is Tyr or deleted; the amino acid at position 192 is Ser, Ile, Val, Leu, Thr or Asn; the amino acid at position 193 is Thr, Ser, Glu or Asp; the amino acid at position 194 is Thr or Ser; the amino acid at position 195 is Met or Thr; the amino acid at position 196 is Gln, His, Leu, Asn, Ile, Val, Thr or Ser; the amino acid at position 197 is Ala, Gly, Ile, Val or Leu; the amino acid at position 198 is Thr, Glu, Ser, Asp, Gly or Ala; the amino acid at position 199 is Pro, Lys or Arg; the amino acid at position 200 is Asn, Ser, Thr, Gln, Ala or Gly; the amino acid at position 201 is Ala, Leu, Glu, Ile, Asp or Trp; the amino acid at position 202 is Ser, Asp, Phe, Ile, Val, Thr, Glu or Leu; the amino acid at position 203 is His, Pro, Gly, Ala, Thr or Ser; the amino acid at position 204 is Ile, Trp, His, Leu, Val, Ala or Gly; the amino acid at position 205 is Ser, Asn, Leu, Val, Thr, Gln or Ile; the amino acid at position 206 is Ala, Gly, Asp, Tyr, Glu, Lys or Arg; the amino acid at position 207 is Phe, Val, Ile or Leu; the amino acid at position 208 is Asn, Ser, Pro, Gln, Thr, Val, Ile or Leu; the amino acid at position 210 is Arg, Asp, Glu, Lys, Ser or Tyr; the amino acid at position 211 is Ile, Ser, Leu, Val or Thr; the amino acid at position 212 is Val, Ala, Ile, Leu, Glu, Gly or Asp; the amino acid at position 214 is Pro, Lys or Arg; the amino acid at position 215 is Ser or Thr; the amino acid at position 217 is Tyr or Phe; the amino acid at position 218 is Arg, Lys, Thr or Ser; the amino acid at position 219 is Val, Ile, Leu or Ala; the amino acid at position 220 is Cys, Leu, Ile, Val, Thr or Ser; the amino acid at position 221 is Pro or His; the amino acid at position 222 is Leu, Arg, Lys, Ile, Val, Thr or Ser; the amino acid at position 224 is Asn, Gln, Thr or Ser; the amino acid at position 225 is Asp, Arg, Glu, Lys, Ser or Thr; the amino acid at position 226 is Thr, Ser, Gln or Asn; the amino acid at position 227 is Asp, Leu, Glu, Ile, Val or deleted; the amino acid at position 228 is Thr, Ser or deleted; the amino acid at position 229 is Tyr or deleted; the amino acid at position 230 is Leu, Ile, Val or deleted; the amino acid at position 231 is Gly, Ala or deleted; the amino acid at position 232 is Ile, Leu, Val or deleted; the amino acid at position 233 is Pro or deleted; the amino acid at position 234 is Ala, Pro, Gly or deleted; the amino acid at position 235 is Asp, Ile, Leu, Glu or Val; the amino acid at position 236 is Val, Ser, Ile, Leu, Thr, Asp or Glu; the amino acid at position 237 is Ala, Phe or Tyr; the amino acid at position 238 is Ala, Gly, Ser or Thr; the amino acid at position 239 is Val, Ser, Ile, Leu, Thr, Ala or Gly; the amino acid at position 240 is Leu, Val or Ile; the amino acid at position 243 is Asp or Glu; the amino acid at position 249 is Asn, Gln, Thr or Ser; the amino acid at position 252 is Leu, Ile, Val or Met; the amino acid at position 257 is Thr or Ser; the amino acid at position 259 is His, Ile, Val or Leu; the amino acid at position 266 is Ala, Ile, Leu or Val; the amino acid at position 267 is Cys, Ala or Gly; the amino acid at position 268 is His, Arg, Lys or Tyr; the amino acid at position 272 is Asp or Glu; the amino acid at position 273 is Val, Met, Ile or Leu; the amino acid at position 274 is Val, Ile, Leu or Met; the amino acid at position 278 is Gly or Ala; the amino acid at position 279 is Glu, Asp, Gly or Val; the amino acid at position 281 is Leu, Ile, Val, Gly or Ala; the amino acid at position 282 is Asn, Leu or Ile; the amino acid at position 285 is Asn, Gln, Thr or Ser; the amino acid at position 286 is Lys, Asp, Arg or Glu; the amino acid at position 287 is Leu, Ile or Val; the amino acid at position 290 is Pro, Gln, Asn, Lys or Arg; the amino acid at position 291 is Leu, Ile or Val; the amino acid at position 292 is Lys, Arg, Ile, Leu or Val; the amino acid at position 293 is Glu, Asp, Asn or Gln; the amino acid at position 294 is Ser, Asn, Thr, Gln, Arg or Lys; the amino acid at position 295 is Thr or Ser; the amino acid at position 296 is Gln, Asn or His; the amino acid at position 297 is Leu, Ile, Val or Met; the amino acid at position 300 is Ser or Thr; the amino acid at position 301 is Glu, Asp, Gly or Ala; the amino acid at position 302 is Ser, Pro, Thr, Gly or Ala; the amino acid at position 304 is Lys, Arg, Gln or Asn; the amino acid at position 313 is Val, Leu or Ile; the amino acid at position 314 is His, Glu, Asn, Asp or Gln; the amino acid at position 315 is Ala, Cys, Gly, Thr or Ser; the amino acid at position 316 is Ala, Ile, Leu or Val; the amino acid at position 317 is Met, Leu, Val or Ile; the amino acid at position 319 is Met, Leu, Val or Ile; the amino acid at position 320 is Val, Ile, Leu, Ala or Gly; the amino acid at position 321 is Arg, Lys or Pro; the amino acid at position 322 is Ile, Leu, Val or Phe; the amino acid at position 323 is Gly, Ile, Leu or Val; the amino acid at position 324 is Leu, Ile, Val, Thr or Ser; the amino acid at position 336 is Ser, Thr, Gln or Asn; the amino acid at position 339 is Asn, Lys, Gln or Arg; the amino acid at position 350 is Arg, Lys, Asn or Gln; the amino acid at position 351 is Glu or Asp; the amino acid at position 353 is Lys or Arg; the amino acid at position 354 is Gln, Asn, Lys or Arg; the amino acid at position 355 is Phe, Ile, Leu or Leu; the amino acid at position 356 is Lys or Arg; the amino acid at position 360 is Ile, Val, Leu, Gly or Ala; the amino acid at position 365 is Leu, Ile, Val or Phe; the amino acid at position 371 is or Glu or Asp; the amino acid at position 372 is or Lys or Arg; the amino acid at position 374 is Arg or Lys; the amino acid at position 376 is Phe, Ile, Val or Leu; the amino acid at position 378 is Glu or Asp; the amino acid at position 381 is Leu, Ile or Val; the amino acid at position 388 is Ala, Thr, Gly or Ser; the amino acid at position 395 is Arg or Lys; the amino acid at position 396 is Glu, Gln, Asp, Asn, Ala or Gly; the amino acid at position 399 is Asp, Gln, Glu or Asn; the amino acid at position 400 is Asn, Thr, Ser, Glu, Gln or Asp; the amino acid at position 401 is Thr, Ser, Gly or Ala; the amino acid at position 402 is Phe, Ile, Val or Leu; the amino acid at position 406 is Asp or Glu; the amino acid at position 408 is Leu, Ile, Val or Met; the amino acid at position 410 is Gly, Ile, Val, Ala or Leu; the amino acid at position 414 is Ala, Gly, Asp or Glu; the amino acid at position 416 is Ser, Asn, Thr, Gln, Glu or Asp; the amino acid at position 417 is Ser, Arg, Lys, Thr, Ala or Gly; the amino acid at position 423 is Lys, Arg, Asn or Gln; the amino acid at position 431 is Arg or Lys; the amino acid at position 432 is Gln, Asn, Asp or Glu; the amino acid at position 436 is Arg, Lys, Asp or Glu; the amino acid at position 440 is Asn, Gln, Lys or Arg; the amino acid at position 442 is Leu, Ile or Val; the amino acid at position 447 is Ser, Lys, Thr or Arg; the amino acid at position 448 is Ala, Gly, Thr or Ser; the amino acid at position 451 is Gln, Asn or Met; the amino acid at position 453 is Gly or Ala; the amino acid at position 455 is Ala, Leu, Ile or Val; the amino acid at position 457 is Leu, Ile or Val; the amino acid at position 467 is Val, Ile, Leu, Gly or Ala; the amino acid at position 471 is Gly or Ala; the amino acid at position 475 is Ser, Thr, Gln or Asn; the amino acid at position 483 is Gly or Ala; the amino acid at position 493 is Gln, Asn or Gly; the amino acid at position 504 is Val, Leu or Ile; the amino acid at position 506 is Asp, Glu or His; the amino acid at position 509 is Asp, Glu, Gln or Asn; the amino acid at position 510 is Ser, Thr, Gly or Ala; the amino acid at position 512 is Glu or Asp; the amino acid at position 515 is Gly, Ala, Thr or Ser; the amino acid at position 516 is Gln, Asn or His; the amino acid at position 517 is Ile, Val or Leu; the amino acid at position 519 is Asp, Asn, Glu, Gly or Gln; the amino acid at position 522 is Val, Glu, Pro, Ile, Leu or Asp; the amino acid at position 525 is Glu or Asp; the amino acid at position 526 is Leu, Ile, Val or Met; the amino acid at position 539 is Val, Leu or Ile; the amino acid at position 555 is Val, Leu, Ile or Ala; the amino acid at position 557 is Arg or Lys; the amino acid at position 563 is Val, Leu, Ile or Met; the amino acid at position 571 is Ser, Thr or Cys; the amino acid at position 575 is Val, Leu, Ile, Asp or Glu; the amino acid at position 577 is Met, Leu, Val or Ile; the amino acid at position 579 is Glu, Asp, Asn or Gln; the amino acid at position 583 is Asp or Glu; the amino acid at position 589 is Met, Ile, Val or Leu; the amino acid at position 590 is Met, Ile, Val or Leu; the amino acid at position 593 is Met, Leu, Val or Ile; the amino acid at position 595 is Arg, Lys, Asn or Gln; the amino acid at position 596 is Ser or Thr; the amino acid at position 597 is Gln, Asn or His; the amino acid at position 607 is Ala, Gly, Ile, Leu or Val; the amino acid at position 608 is Asp, Glu, Gln or Asn; the amino acid at position 612 is Tyr, His or Phe; the amino acid at position 617 is Thr, Ser, Leu, Val or Ile; the amino acid at position 618 is Gln, Asn or His; the amino acid at position 625 is Arg, Lys, Thr or Ser; the amino acid at position 626 is Met, Leu, Val or Ile; the amino acid at position 628 is Leu, Val or Ile; the amino acid at position 633 is Ile, Leu, Val or Met; the amino acid at position 634 is Leu, Ile, Val or Met; the amino acid at position 642 is Arg, Lys or Met; the amino acid at position 648 is Met, Ser or Thr; the amino acid at position 651 is Glu, Asp, Asn or Gln; the amino acid at position 654 is Thr, Val, Ser, Ile, Leu, Gly or Ala; the amino acid at position 658 is Gly, Lys, Ala or Arg; the amino acid at position 663 is Gly or Ala; the amino acid at position 664 is Asp, Glu, Gln or Asn; the amino acid at position 668 is Ala, Gly, Ser or Thr; the amino acid at position 669 is Gln, Asn or His; the amino acid at position 671 is Asn, Gln, Thr or Ser the amino acid at position 675 is Ile, Val, Ile, Thr or Ser; the amino acid at position 678 is Met, Ile, Ala, Leu, Ser or Thr; the amino acid at position 682 is Pro, Asn or Gln; the amino acid at position 683 is Ser, Thr or Pro; the amino acid at position 685 is Asp, Glu, Asp or Asn; the amino acid at position 694 is Asp, Glu, Ala or Gly; the amino acid at position 697 is Asn, Gln, Thr or Ser; the amino acid at position 704 is Glu, Asp, Ala or Gly; the amino acid at position 714 is Ala or Gly; the amino acid at position 721 is Ser, Thr or Phe; the amino acid at position 722 is Ser, Thr, Gln or Asn; the amino acid at position 724 is Ser or Thr; the amino acid at position 734 is His, Asn or Gln; the amino acid at position 736 is Val, Leu, Ile or Ala; the amino acid at position 737 is Lys, Arg, Asn or Gln; the amino acid at position 739 is Ala, Gly, Thr or Ser; the amino acid at position 740 is Ser, Thr or Met; the amino acid at position 741 is Gly, Ala, Gln or Asn; the amino acid at position 742 is Ile, Leu, Val, Ala or Gly; the amino acid at position 743 is Gly or deleted; the amino acid at position 745 is Gly, Ala, Glu or Asp; the amino acid at position 751 is Thr, Ser, Gly or Ala; the amino acid at position 753 is Gln, Asn, Lys or Arg; the amino acid at position 754 is Thr or Ser; the amino acid at position 756 is Thr, Ser, Leu, Val or Ile; the amino acid at position 757 is Val, Leu or Ile; the amino acid at position 766 is Ile, Leu or Val; the amino acid at position 773 is Asp or Glu; the amino acid at position 774 is Gln, Asn, Asp or Glu; the amino acid at position 776 is Leu, Ile, Val or Met; the amino acid at position 777 is Pro, Ser or Thr; the amino acid at position 782 is Ala, Asp, Glu, Ile, Leu or Val; the amino acid at position 786 is Tyr or Phe; the amino acid at position 787 is His, Asn or Gln; the amino acid at position 788 is Tyr or Met; the amino acid at position 789 is Ala, Lys or Arg; the amino acid at position 790 is Tyr or Thr; the amino acid at position 791 is Arg, Lys, Gly or Ala; the amino acid at position 792 is Leu, Ile, Val, Thr or Ser; the amino acid at position 796 is Asp or Glu; the amino acid at position 797 is Ser, Thr or Ala the amino acid at position 802 is Glu, Lys, Asp, Asn or Gln; the amino acid at position 806 is Gln, Asp, Glu, Asn or His; the amino acid at position 810 is Lys, Arg or Thr; the amino acid at position 819 is Arg, Lys or His; the amino acid at position 829 is Lys, Ser, Ala or Pro; the amino acid at position 832 is Ala, Lys, Arg, Asp or Glu; the amino acid at position 833 is Gly, Ala, Asp or Glu; the amino acid at position 842 is Leu, Ile, Val or Pro; the amino acid at position 847 is Gln, Asn, Asp or Glu; the amino acid at position 848 is Ile, Leu or Val; the amino acid at position 849 is Val, Leu, Ile, Gly or Ala; the amino acid at position 855 is Thr, Ser or Met; the amino acid at position 860 is Ile, Leu or Val; the amino acid at position 864 is His, Asn or Gln;

[0142] In some embodiments the PtIP-83 polypeptide is a variant of SEQ ID NO: 1, wherein the amino acid at position 1 is Met or deleted; the amino acid at position 2 is Ala or deleted; the amino acid at position 3 is Leu, Val, Ile or deleted; the amino acid at position 4 is Val, Met, Ile or Leu; the amino acid at position 7 is Gly, Thr or Ser; the amino acid at position 8 is Lys, Arg, Ser or Thr; the amino acid at position 10 is Phe, Trp or Tyr; the amino acid at position 11 is Glu, Asp, Lys or Arg; the amino acid at position 18 is Met, Val, Leu or Ile; the amino acid at position 19 is Gly, Pro or Ala; the amino acid at position 20 is Val, Ile, Leu or deleted; the amino acid at position 21 is Leu, Ile or Val; the amino acid at position 23 is Arg, Lys, Asn or Gln; the amino acid at position 37 is Val, Ile or Leu; the amino acid at position 38 is Arg, Lys, Gln or Asn; the amino acid at position 40 is Ala, Gly, Thr or Ser; the amino acid at position 43 is Asn, Gln, Glu or Asp; the amino acid at position 45 is Gly or Ala; the amino acid at position 46 is Gln, Asp, Asn or Glu; the amino acid at position 48 is Glu, Asp, Pro, Ile, Leu or Val; the amino acid at position 51 is Glu, Asp, Ala or Gly; the amino acid at position 52 is Lys, Arg, Ser or Thr; the amino acid at position 53 is Val, Ala, Cys or Thr; the amino acid at position 54 is Lys, Ala, Cys, Asp, Glu, Gly, His, Ile, Leu, Met, Asn, Gln, Arg, Ser or Thr; the amino acid at position 55 is Arg, Ala, Asp, Glu, Phe, Gly, His, Lys, Leu, Met, Asn, Gln, Ser, Thr, Val, Trp or Tyr; the amino acid at position 56 is Leu, Glu, Phe, Ile, Met, Thr or Val; the amino acid at position 57 is Tyr, Cys, Ile, Leu, Met, Thr or Val; the amino acid at position 58 is Val, Cys, Ile or Leu; the amino acid at position 59 is Phe, Leu, Met, Val or Tyr; the amino acid at position 60 is Ala, Cys, Gly, Ser, Thr or Val; the amino acid at position 61 is Asp, Glu, His or Ser; the amino acid at position 62 is Val, Ala, Cys, Ile, Leu or Thr; the amino acid at position 63 is Val, Ala, Cys, Ile, Leu, Met or Thr; the amino acid at position 64 is Glu, Ala, Cys, Phe, Gly, His, Ile, Leu, Met, Asn, Gln, Arg, Ser, Thr, Val, Trp or Tyr; the amino acid at position 65 is Leu, Ala, Cys, Phe, His, Ile, Met, Asn, Gln, Thr, Val or Trp; the amino acid at position 66 is Pro, Asp, Gly, Met, Gln or Arg; the amino acid at position 67 is Val, Pro, Ile, Leu, Ser or Thr; the amino acid at position 68 is Val, Arg, Phe, Ile, Leu, Lys or Gly; the amino acid at position 69 is Glu, Ala, Asp, Gly, Arg or Lys; the amino acid at position 70 is Trp, Thr, His, Tyr, Lys or Arg; the amino acid at position 71 is Arg, Pro, Lys or deleted; the amino acid at position 72 is Trp, Asp, Leu, Ile, Val, Glu or deleted; the amino acid at position 73 is Pro, Gln, Asn, His or deleted; the amino acid at position 74 is Pro, Met, Ser or Thr; the amino acid at position 75 is Gln, His, Asn, Lys or Arg; the amino acid at position 76 is Ile, Met, Val or Leu; the amino acid at position 84 is Ile, Leu or Val; the amino acid at position 91 is Trp or Phe; the amino acid at position 93 is Thr, Ser, Leu, Val or Ile; the amino acid at position 94 is Asp, Glu, Ala or Gly; the amino acid at position 96 is Arg, Lys, Thr or Ser; the amino acid at position 97 is Gln, Phe, Asn, Lys or Arg; the amino acid at position 98 is Ser, Thr or deleted; the amino acid at position 99 is Asp, Glu, Gly or Ala; the amino acid at position 100 is Thr, Ser, Gly or Ala; the amino acid at position 101 is Glu, Thr, Asp, Ser or Trp the amino acid at position 103 is His, Arg, Lys, Glu or Gln; the amino acid at position 105 is Thr, Ser or Pro; the amino acid at position 108 is Lys, Arg, Asn, Asp, Gln or Glu; the amino acid at position 109 is Leu, Ile or Val; the amino acid at position 111 is Ala, Ser or Thr; the amino acid at position 112 is Ile, Arg, Thr, Leu, Val, Lys, Ser or deleted; the amino acid at position 113 is Gln, Ala, Gly, Asn or deleted; the amino acid at position 114 is Arg, Glu, Lys, Asp or Ile; the amino acid at position 115 is Glu, Asp, Asn or Gln; the amino acid at position 116 is Glu, Asn, Gln, Asp, Lys or Arg; the amino acid at position 117 is Asn, Val, Tyr, Ile, Leu, Gln, Trp or Phe; the amino acid at position 118 is Arg or Lys; the amino acid at position 119 is Trp, Thr or Ser; the amino acid at position 122 is Thr, Lys, Ser, Arg or Ala; the amino acid at position 124 is Ala, Gly, Ser or Thr; the amino acid at position 126 is Gly, Ala, Glu or Asp; the amino acid at position 127 is Met, Gly or Ala; the amino acid at position 128 is Asn, Gln, Arg or Lys; the amino acid at position 131 is Val, Ile, Leu, Ser or Thr; the amino acid at position 133 is Ile, Leu or Val; the amino acid at position 134 is His or Tyr; the amino acid at position 135 is Ala or Gly; the amino acid at position 137 is Glu, Asp, Arg or Lys; the amino acid at position 139 is Gln, Asn, Asp or Glu; the amino acid at position 140 is Val, Arg, Ile, Lys or Leu; the amino acid at position 141 is Gly, Ala, Thr or Ser; the amino acid at position 142 is Val, Ile, Leu or Pro; the amino acid at position 144 is Thr, Leu, Phe, Ile, Val or Tyr; the amino acid at position 145 is Met, Pro, Gln or Asn; the amino acid at position 146 is Ser, Gly, Thr, Ala, Gln or Asn; the amino acid at position 147 is Trp, Gln, Tyr or Asn; the amino acid at position 148 is Ser, Ala, Thr, Gly or Pro; the amino acid at position 149 is Ser, Thr or deleted; the amino acid at position 150 is Val, Ile, Leu or Tyr; the amino acid at position 152 is Arg, Ala, Val, Ile, Leu, Lys or Gly; the amino acid at position 154 is Ser, Trp, Thr, Asp or Glu; the amino acid at position 156 is Leu, Asp, Ile, Val, Asn, Glu or Gln; the amino acid at position 158 is Ser, Thr or Cys; the amino acid at position 159 is Val, Thr, Leu or Ile; the amino acid at position 162 is Ser, Thr, Gly or Ala; the amino acid at position 163 is Gly, Ala or deleted; the amino acid at position 164 is Phe or deleted; the amino acid at position 165 is Arg, Lys, Gly or Ala; the amino acid at position 166 is Ala, Arg, Met, Lys or Phe; the amino acid at position 167 is Val, Ile, Leu or His; the amino acid at position 168 is Ser, Thr, Gln or Asn; the amino acid at position 169 is Val, His, Ile, Leu, Ser or Thr; the amino acid at position 170 is Phe, Ile, Leu or Val; the amino acid at position 171 is Glu, Asn, Gln or Asp; the amino acid at position 172 is Val, Ala, Arg, Ile, Leu, Gly, Lys, Asp or Glu; the amino acid at position 175 is Ser, Arg, Thr, Lys or Trp; the amino acid at position 176 is Val, Leu or Ile; the amino acid at position 177 is Arg, Lys, Leu, Val or Ile; the amino acid at position 179 is Thr, Ile, Val, Leu or Ser; the amino acid at position 180 is Leu, Phe, Ile, Val, Ser or Thr; the amino acid at position 181 is Gly, Thr, Gln, Asn or Ser; the amino acid at position 182 is Ala, Leu, Phe, Val or Ile; the amino acid at position 183 is Thr, Ser, Ala or Gly; the amino acid at position 184 is Leu, Thr, Ser, Ile, Val, Lys or Arg; the amino acid at position 185 is Arg, Gly, Asp, Lys, Glu or Ala; the amino acid at position 186 is Pro, Val, Ile, Leu, Asn or Gln; the amino acid at position 187 is Asp, Thr, Glu or Ser; the amino acid at position 188 is His, Gly or Ala; the amino acid at position 189 is Ala, Arg, Pro, Lys, Gly or deleted; the amino acid at position 190 is Leu, Asn, Ile, Val, Gln or deleted; the amino acid at position 191 is Tyr or deleted; the amino acid at position 192 is Ser, Ile, Val, Leu, Thr or Asn; the amino acid at position 193 is Thr, Ser, Glu or Asp; the amino acid at position 194 is Thr or Ser; the amino acid at position 195 is Met or Thr; the amino acid at position 196 is Gln, His, Leu, Asn, Ile, Val, Thr or Ser; the amino acid at position 197 is Ala, Gly, Ile, Val or Leu; the amino acid at position 198 is Thr, Glu, Ser, Asp, Gly or Ala; the amino acid at position 199 is Pro, Lys or Arg; the amino acid at position 200 is Asn, Ser, Thr, Gln, Ala or Gly; the amino acid at position 201 is Ala, Leu, Glu, Ile, Asp or Trp; the amino acid at position 202 is Ser, Asp, Phe, Ile, Val, Thr, Glu or Leu; the amino acid at position 203 is His, Pro, Gly, Ala, Thr or Ser; the amino acid at position 204 is Ile, Trp, His, Leu, Val, Ala or Gly; the amino acid at position 205 is Ser, Asn, Leu, Val, Thr, Gln or Ile; the amino acid at position 206 is Ala, Gly, Asp, Tyr, Glu, Lys or Arg; the amino acid at position 207 is Phe, Val, Ile or Leu; the amino acid at position 208 is Asn, Ser, Pro, Gln, Thr, Val, Ile or Leu; the amino acid at position 210 is Arg, Asp, Glu, Lys, Ser or Tyr; the amino acid at position 211 is Ile, Ser, Leu, Val or Thr; the amino acid at position 212 is Val, Ala, Ile, Leu, Glu, Gly or Asp; the amino acid at position 214 is Pro, Lys or Arg; the amino acid at position 215 is Ser or Thr; the amino acid at position 217 is Tyr or Phe; the amino acid at position 218 is Arg, Lys, Thr or Ser; the amino acid at position 219 is Val, Ile, Leu or Ala; the amino acid at position 220 is Cys, Leu, Ile, Val, Thr or Ser; the amino acid at position 221 is Pro or His; the amino acid at position 222 is Leu, Arg, Lys, Ile, Val, Thr or Ser; the amino acid at position 224 is Asn, Gln, Thr or Ser; the amino acid at position 225 is Asp, Arg, Glu, Lys, Ser or Thr; the amino acid at position 226 is Thr, Ser, Gln or Asn; the amino acid at position 227 is Asp, Leu, Glu, Ile, Val or deleted; the amino acid at position 228 is Thr, Ser or deleted; the amino acid at position 229 is Tyr or deleted; the amino acid at position 230 is Leu, Ile, Val or deleted; the amino acid at position 231 is Gly, Ala or deleted; the amino acid at position 232 is Ile, Leu, Val or deleted; the amino acid at position 233 is Pro or deleted; the amino acid at position 234 is Ala, Pro, Gly or deleted; the amino acid at position 235 is Asp, Ile, Leu, Glu or Val; the amino acid at position 236 is Val, Ser, Ile, Leu, Thr, Asp or Glu; the amino acid at position 237 is Ala, Phe or Tyr; the amino acid at position 238 is Ala, Gly, Ser or Thr; the amino acid at position 239 is Val, Ser, Ile, Leu, Thr, Ala or Gly; the amino acid at position 240 is Leu, Val or Ile; the amino acid at position 243 is Asp or Glu; the amino acid at position 249 is Asn, Gln, Thr or Ser; the amino acid at position 252 is Leu, Ile, Val or Met; the amino acid at position 257 is Thr or Ser; the amino acid at position 259 is His, Ile, Val or Leu; the amino acid at position 266 is Ala, Ile, Leu or Val; the amino acid at position 267 is Cys, Ala or Gly; the amino acid at position 268 is His, Arg, Lys or Tyr; the amino acid at position 272 is Asp or Glu; the amino acid at position 273 is Val, Met, Ile or Leu; the amino acid at position 274 is Val, Ile, Leu or Met; the amino acid at position 278 is Gly or Ala; the amino acid at position 279 is Glu, Asp, Gly or Val; the amino acid at position 281 is Leu, Ile, Val, Gly or Ala; the amino acid at position 282 is Asn, Leu or Ile; the amino acid at position 285 is Asn, Gln, Thr or Ser; the amino acid at position 286 is Lys, Asp, Arg or Glu; the amino acid at position 287 is Leu, Ile or Val; the amino acid at position 290 is Pro, Gln, Asn, Lys or Arg; the amino acid at position 291 is Leu, Ile or Val; the amino acid at position 292 is Lys, Arg, Ile, Leu or Val; the amino acid at position 293 is Glu, Asp, Asn or Gln; the amino acid at position 294 is Ser, Asn, Thr, Gln, Arg or Lys; the amino acid at position 295 is Thr or Ser; the amino acid at position 296 is Gln, Asn or His; the amino acid at position 297 is Leu, Ile, Val or Met; the amino acid at position 300 is Ser or Thr; the amino acid at position 301 is Glu, Asp, Gly or Ala; the amino acid at position 302 is Ser, Pro, Thr, Gly or Ala; the amino acid at position 304 is Lys, Arg, Gln or Asn; the amino acid at position 313 is Val, Leu or Ile; the amino acid at position 314 is His, Glu, Asn, Asp or Gln; the amino acid at position 315 is Ala, Cys, Gly, Thr or Ser; the amino acid at position 316 is Ala, Ile, Leu or Val; the amino acid at position 317 is Met, Leu, Val or Ile; the amino acid at position 319 is Met, Leu, Val or Ile; the amino acid at position 320 is Val, Ile, Leu, Ala or Gly; the amino acid at position 321 is Arg, Lys or Pro; the amino acid at position 322 is Ile, Leu, Val or Phe; the amino acid at position 323 is Gly, Ile, Leu or Val; the amino acid at position 324 is Leu, Ile, Val, Thr or Ser; the amino acid at position 336 is Ser, Thr, Gln or Asn; the amino acid at position 339 is Asn, Lys, Gln or Arg; the amino acid at position 350 is Arg, Lys, Asn or Gln; the amino acid at position 351 is Glu or Asp; the amino acid at position 353 is Lys or Arg; the amino acid at position 354 is Gln, Asn, Lys or Arg; the amino acid at position 355 is Phe, Ile, Leu or Leu; the amino acid at position 356 is Lys or Arg; the amino acid at position 360 is Ile, Val, Leu, Gly or Ala; the amino acid at position 363 is Gln, Ala, Cys, Glu, Phe, Gly, His, Lys, Leu, Asn, Arg, Ser, Thr, Val or Trp; the amino acid at position 364 is Ile, Ala, Cys, Glu, Phe, His, Lys, Leu, Met, Asn, Gln, Ser, Thr, Val, Trp or Tyr; the amino acid at position 365 is Leu, Ala, Glu, Phe, Gly, His, Ile, Lys, Met, Asn, Arg, Val, Trp or Tyr; the amino acid at position 366 is Gly, Ala, Cys, Phe, His, Ile, Lys, Leu, Met, Asn, Ser, Thr or Val; the amino acid at position 367 is Ser, Ala, Cys, Asp, Glu, Phe, Gly, His, Ile, Leu, Met, Asn, Pro, Gln, Arg, Thr, Val or Trp; the amino acid at position 368 is Tyr, Ala, Cys, Asp, Glu, Phe, Gly, His, Ile, Lys, Leu, Met, Asn, Pro, Gln, Arg, Ser, Thr, Val or Trp; the amino acid at position 369 is Leu, Ala, Cys, Asp, Phe, Gly, Ile, Met, Thr or Val; the amino acid at position 370 is Leu, Ala, Cys, Asp, Glu, Phe, Gly, His, Ile, Lys, Met, Gln, Arg, Ser, Thr, Val, Trp or Tyr; the amino acid at position 371 is Gln, Ala, Cys, Asp, Glu, Phe, Gly, Ile, Lys, Leu, Asn, Arg, Ser, Thr, Val or Trp; the amino acid at position 372 is Gln, Ala, Cys, Asp, Phe, Gly, His, Ile, Leu, Asn, Arg, Ser, Val or Tyr; the amino acid at position 373 is Asn, Ala, Cys, Asp, Phe, Gly, His, Ile, Lys, Gln, Ser, Thr, Val or Trp; the amino acid at position 374 is Arg or Lys; the amino acid at position 376 is Phe, Ile, Val or Leu; the amino acid at position 378 is Glu or Asp; the amino acid at position 381 is Leu, Ile or Val; the amino acid at position 388 is Ala, Thr, Gly or Ser; the amino acid at position 395 is Arg or Lys; the amino acid at position 396 is Glu, Gln, Asp, Asn, Ala or Gly; the amino acid at position 399 is Asp, Gln, Glu or Asn; the amino acid at position 400 is Asn, Thr, Ser, Glu, Gln or Asp; the amino acid at position 401 is Thr, Ser, Gly or Ala; the amino acid at position 402 is Phe, Ile, Val or Leu; the amino acid at position 406 is Asp or Glu; the amino acid at position 408 is Leu, Ile, Val or Met; the amino acid at position 410 is Gly, Ile, Val, Ala or Leu; the amino acid at position 414 is Ala, Gly, Asp or Glu; the amino acid at position 416 is Ser, Asn, Thr, Gln, Glu or Asp; the amino acid at position 417 is Ser, Arg, Lys, Thr, Ala or Gly; the amino acid at position 423 is Lys, Arg, Asn or Gln; the amino acid at position 431 is Arg or Lys; the amino acid at position 432 is Gln, Asn, Asp or Glu; the amino acid at position 436 is Arg, Lys, Asp or Glu; the amino acid at position 440 is Asn, Gln, Lys or Arg; the amino acid at position 442 is Leu, Ile or Val; the amino acid at position 447 is Ser, Lys, Thr or Arg; the amino acid at position 448 is Ala, Gly, Thr or Ser; the amino acid at position 451 is Gln, Asn or Met; the amino acid at position 453 is Gly or Ala; the amino acid at position 455 is Ala, Leu, Ile or Val; the amino acid at position 457 is Leu, Ile or Val; the amino acid at position 467 is Val, Ile, Leu, Gly or Ala; the amino acid at position 471 is Gly or Ala; the amino acid at position 475 is Ser, Thr, Gln or Asn; the amino acid at position 483 is Gly or Ala; the amino acid at position 493 is Gln, Asn or Gly; the amino acid at position 504 is Val, Leu or Ile; the amino acid at position 506 is Asp, Glu or His; the amino acid at position 509 is Asp, Glu, Gln or Asn; the amino acid at position 510 is Ser, Thr, Gly or Ala; the amino acid at position 512 is Glu or Asp; the amino acid at position 515 is Gly, Ala, Thr or Ser; the amino acid at position 516 is Gln, Asn or His; the amino acid at position 517 is Ile, Val or Leu; the amino acid at position 519 is Asp, Asn, Glu, Gly or Gln; the amino acid at position 522 is Val, Glu, Pro, Ile, Leu or Asp; the amino acid at position 525 is Glu or Asp; the amino acid at position 526 is Leu, Ile, Val or Met; the amino acid at position 539 is Val, Leu or Ile; the amino acid at position 555 is Val, Leu, Ile or Ala; the amino acid at position 556 is Trp, Phe, Thr or Tyr; the amino acid at position 557 is Arg, Cys, Asp, Gly, His, Ile, Lys, Leu, Met, Asn, Pro, Gln, Ser, Thr, Val, Trp or Tyr; the amino acid at position 558 is Ala, Cys, Asp, Phe, Gly, His, Ile, Lys, Leu, Asn, Pro, Gln, Arg, Ser, Val, Trp or Tyr; the amino acid at position 559 is Lys, Ala, Cys, Phe, Gly, His, Ile, Leu, Asn, Gln, Arg, Ser, Thr, Val or Tyr; the amino acid at position 560 is Cys, Ala, Phe, Gly, Ile, Met, Asn, Arg, Ser, Thr or Val; the amino acid at position 561 is Lys, Ala, Cys, Asp, Glu, Phe, Gly, His, Ile, Leu, Met, Asn, Arg, Ser, Thr, Val or Tyr; the amino acid at position 562 is Asn, Cys, Asp, Glu, Gly, His, Leu, Met, Arg, Ser, Thr, Val or Tyr; the amino acid at position 563 is Val, Ala, Cys, Asp, Phe, His, Ile, Leu, Met, Asn, Gln, Thr or Trp; the amino acid at position 564 is Ala, Cys, Gly, Met, Gln, Ser, Thr, Val, Trp or Tyr; the amino acid at position 571 is Ser, Thr or Cys; the amino acid at position 575 is Val, Leu, Ile, Asp or Glu; the amino acid at position 577 is Met, Leu, Val or Ile; the amino acid at position 579 is Glu, Asp, Asn or Gln; the amino acid at position 583 is Asp or Glu; the amino acid at position 589 is Met, Ile, Val or Leu; the amino acid at position 590 is Met, Ile, Val or Leu; the amino acid at position 593 is Met, Leu, Val or Ile; the amino acid at position 595 is Arg, Lys, Asn or Gln; the amino acid at position 596 is Ser or Thr; the amino acid at position 597 is Gln, Asn or His; the amino acid at position 607 is Ala, Gly, Ile, Leu or Val; the amino acid at position 608 is Asp, Glu, Gln or Asn; the amino acid at position 612 is Tyr, His or Phe; the amino acid at position 617 is Thr, Ser, Leu, Val or Ile; the amino acid at position 618 is Gln, Asn or His; the amino acid at position 625 is Arg, Lys, Thr or Ser; the amino acid at position 626 is Met, Leu, Val or Ile; the amino acid at position 628 is Leu, Val or Ile; the amino acid at position 633 is Ile, Leu, Val or Met; the amino acid at position 634 is Leu, Ile, Val or Met; the amino acid at position 642 is Arg, Lys or Met; the amino acid at position 646 is Leu, Ala, Cys, Gly, Ile, Met, Asn, Gln, Ser, Thr or Val; the amino acid at position 647 is Leu, Asp, Gly, Met, Asn, Gln or Thr; the amino acid at position 648 is Met, Ala, Cys, Asp, Glu, Phe, Gly, His, Lys, Leu, Asn, Pro, Gln, Arg, Ser, Thr, Val, Trp or Tyr; the amino acid at position 649 is Pro, Ala, Cys, Asp, Glu, Phe, Gly, His, Lys, Met, Asn, Gln, Arg, Ser, Thr, Trp or Tyr; the amino acid at position 650 is Thr, Ala, Cys, Asp, Phe, Gly, His, Ile, Lys, Leu, Met, Pro, Gln, Arg, Ser, Val or Tyr; the amino acid at position 651 is Glu, Ala, Cys, Asp, Gly, His, Ile, Leu, Met, Asn, Pro, Gln, Arg, Ser, Thr, Val or Tyr; the amino acid at position 652 is Leu, Cys, Phe, Ile, Lys, Met, Pro, Arg, Ser, Thr or Val; the amino acid at position 653 is Thr, Cys, Asp, Glu, Phe, Gly, His, Ile, Lys, Leu, Pro, Arg, Ser, Val or Trp; the amino acid at position 654 is Thr, Ala, Cys, Phe, Ile, Lys, Leu, Met, Pro, Arg, Ser, Val, Trp or Tyr; the amino acid at position 655 is Trp, Phe or Tyr; the amino acid at position 658 is Gly, Lys, Ala or Arg; the amino acid at position 663 is Gly or Ala; the amino acid at position 664 is Asp, Glu, Gln or Asn; the amino acid at position 668 is Ala, Gly, Ser or Thr; the amino acid at position 669 is Gln, Asn or His; the amino acid at position 671 is Asn, Gln, Thr or Ser the amino acid at position 675 is Ile, Val, Ile, Thr or Ser; the amino acid at position 678 is Met, Ile, Ala, Leu, Ser or Thr; the amino acid at position 682 is Pro, Asn or Gln; the amino acid at position 683 is Ser, Thr or Pro; the amino acid at position 685 is Asp, Glu, Asp or Asn; the amino acid at position 694 is Asp, Glu, Ala or Gly; the amino acid at position 697 is Asn, Gln, Thr or Ser; the amino acid at position 704 is Glu, Asp, Ala or Gly; the amino acid at position 714 is Ala or Gly; the amino acid at position 721 is Ser, Thr or Phe; the amino acid at position 722 is Ser, Thr, Gln or Asn; the amino acid at position 724 is Ser or Thr; the amino acid at position 734 is His, Asn or Gln; the amino acid at position 736 is Val, Leu, Ile or Ala; the amino acid at position 737 is Lys, Arg, Asn or Gln; the amino acid at position 739 is Ala, Gly, Thr or Ser; the amino acid at position 740 is Ser, Thr or Met; the amino acid at position 741 is Gly, Ala, Gln or Asn; the amino acid at position 742 is Ile, Leu, Val, Ala or Gly; the amino acid at position 743 is Gly or deleted; the amino acid at position 745 is Gly, Ala, Glu or Asp; the amino acid at position 751 is Thr, Ser, Gly or Ala; the amino acid at position 753 is Gln, Asn, Lys or Arg; the amino acid at position 754 is Thr or Ser; the amino acid at position 756 is Thr, Ser, Leu, Val or Ile; the amino acid at position 757 is Val, Leu or Ile; the amino acid at position 766 is Ile, Leu or Val; the amino acid at position 771 is Arg, Ala, Asp, Glu, Phe, Gly, His, Ile, Lys, Leu, Asn, Ser, Thr, Val, Trp or Tyr; the amino acid at position 772 is Arg, Ala, Cys, Asp, Glu, Phe, Gly, His, Ile, Lys, Leu, Met, Pro, Gln, Ser, Thr, Val, Trp or Tyr; the amino acid at position 773 is Asp, Ala, Glu, Phe, Gly, His, Ile, Lys, Leu, Met, Asn, Gln, Arg, Ser, Thr, Val, Trp or Tyr; the amino acid at position 774 is Gln, Ala, Asp, Gly, His, Ile, Lys, Leu, Met, Asn, Pro, Arg, Ser, Thr, Val, Trp or Tyr; the amino acid at position 775 is Val, Ala, Cys, Asp, Glu, Gly, His, Ile, Asn, Pro, Gln, Arg, Ser, Thr or Tyr; the amino acid at position 776 is Leu, Ala, Cys, Asp, Glu, Phe, Gly, His, Ile, Lys, Asn, Pro, Gln, Arg, Ser, Thr, Val or Tyr; the amino acid at position 777 is Pro, Ala, Cys, Asp, Glu, Phe, Gly, His, Lys, Leu, Met, Asn, Gln, Ser, Thr, Val, Trp or Tyr; the amino acid at position 778 is Phe, Ala, His, Ile, Leu, Met, Asn, Gln, Ser, Val, Trp or Tyr; the amino acid at position 779 is Gln, Ala, Cys, Asp, Glu, Gly, His, Lys, Leu, Asn, Pro, Arg, Ser, Thr or Val; the amino acid at position 780 is Ala, Cys, Asn, Pro, Gln or Ser; the amino acid at position 781 is Ala, Cys, Asp, Glu, Phe, Gly, His, Ile, Asn, Gln, Arg, Ser, Thr, Val, Trp or Tyr; the amino acid at position 782 is Ala, Cys, Asp, Glu, Phe, Gly, His, Ile, Lys, Met, Pro, Gln, Arg, Ser, Thr, Val, Trp or Tyr; the amino acid at position 783 is Pro, Ala, Cys, Asp, Glu, Gly, His, Asn, Gln, Arg, Ser, Thr or Val; the amino acid at position 784 is Leu, Ala, Glu, Phe, His, Ile, Lys, Met, Asn, Pro, Gln, Ser, Thr, Val or Trp; the amino acid at position 785 is Asn, Ala, Cys, Glu, Phe, Gly, His, Ile, Lys, Leu, Met, Gln, Arg, Ser, Thr, Val, Trp or Tyr; the amino acid at position 786 is Tyr, Phe, Ile, Leu or Trp; the amino acid at position 787 is His, Asn or Gln; the amino acid at position 788 is Tyr or Met; the amino acid at position 789 is Ala, Lys or Arg; the amino acid at position 790 is Tyr or Thr; the amino acid at position 791 is Arg, Lys, Gly or Ala; the amino acid at position 792 is Leu, Ile, Val, Thr or Ser; the amino acid at position 796 is Asp or Glu; the amino acid at position 797 is Ser, Thr or Ala the amino acid at position 802 is Glu, Lys, Asp, Asn or Gln; the amino acid at position 806 is Gln, Asp, Glu, Asn or His; the amino acid at position 810 is Lys, Arg or Thr; the amino acid at position 819 is Arg, Lys or His; the amino acid at position 829 is Lys, Ser, Ala or Pro; the amino acid at position 832 is Ala, Lys, Arg, Asp or Glu; the amino acid at position 833 is Gly, Ala, Asp or Glu; the amino acid at position 842 is Leu, Ile, Val or Pro; the amino acid at position 847 is Gln, Asn, Asp or Glu; the amino acid at position 848 is Ile, Leu or Val; the amino acid at position 849 is Val, Leu, Ile, Gly or Ala; the amino acid at position 855 is Thr, Ser or Met; the amino acid at position 860 is Ile, Leu or Val; and the amino acid at position 864 is His, Asn or Gln.

[0143] In some embodiments the nucleic acid molecule encoding the PtIP-83 polypeptide is derived from a fern species in the Division Pteridophyta. In some embodiments the PtIP-83 polypeptide is derived from a fern species in the Class Psilotopsida. In some embodiments the PtIP-83 polypeptide is derived from a fern species in the Class Psilotopsida, Order Psilotales. In some embodiments the PtIP-83 polypeptide is derived from a fern species in the Class Psilotopsida, Order Ophioglossales. In some embodiments the PtIP-83 polypeptide is derived from a fern species in the Class Psilotopsida, Order Ophioglossales, Family Psilotaceae. In some embodiments the PtIP-83 polypeptide is derived from a fern species in the Class Psilotopsida, Order Ophioglossales Family Ophioglossaceae. In some embodiments the PtIP-83 polypeptide is derived from a fern species in the Genus Ophioglossum L., Botrychium, Botrypus, Helminthostachys, Ophioderma, Cheiroglossa, Sceptridium or Mankyua. In some embodiments the PtIP-83 polypeptide is derived from a species in the Class Polypodiopsida/Pteridopsida. In some embodiments the PtIP-83 polypeptide is derived from a fern species in the Order Osmundales (royal ferns); Family Osmundaceae. In some embodiments the PtIP-83 polypeptide is derived from a fern species in the Order Hymenophyllales; Family Hymenophyllaceae. In some embodiments the PtIP-83 polypeptide is derived from a fern species in the Order Gleicheniales; Family Gleicheniaceae, Family Dipteridaceae or Family Matoniaceae. In some embodiments the PtIP-83 polypeptide is derived from a fern species in the Order Schizaeales; Family Lygodiaceae, Family Anemiaceae or Family Schizaeaceae. In some embodiments the PtIP-83 polypeptide is derived from a fern species in the Order Schizaeales; Family Schizaeaceae, Genus Lygodium selected from but not limited to Lygodium articulatum, Lygodium circinatum, Lygodium conforme, Lygodium cubense, Lygodium digitatum, Lygodium flexuosum, Lygodium heterodoxum, Lygodium japonicum, Lygodium kerstenii, Lygodium lanceolatum, Lygodium longifolium, Lygodium merrilii, Lygodium micans, Lygodium microphyllum, Lygodium microstachyum, Lygodium oligostachyum, Lygodium palmatum, Lygodium polystachyum, Lygodium radiatum, Lygodium reticulatum, Lygodium salicifolium, Lygodium scandens, Lygodium smithianum, Lygodium subareolatum, Lygodium trifurcatum, Lygodium venustum, Lygodium versteeghii, Lygodium volubile, and Lygodium yunnanense.

[0144] In some embodiments the PtIP-83 polypeptide is derived from a fern species in the Order Salviniales; Family Marsileaceae or Family Salviniaceae. In some embodiments the PtIP-83 polypeptide is derived from a fern species in the Order Cyatheales; Family Thyrsopteridaceae, Family Loxsomataceae, Family Culcitaceae, Family Plagiogyriaceae, Family Cibotiaceae, Family Cyatheaceae, Family Dicksoniaceae or Family Metaxyaceae.

[0145] In some embodiments the PtIP-83 polypeptide is derived from a fern species in the Order Polypodiales; Family Lindsaeaceae, Family Saccolomataceae, Family Cystodiaceae, Family Dennstaedtiaceae, Family Pteridaceae, Family Aspleniaceae, Family Thelypteridaceae, Family Woodsiaceae, Family Onocleaceae, Family Blechnaceae, Family Dryopteridaceae, Family Lomariopsidaceae, Family Tectariaceae, Family Oleandraceae, Family Davalliaceae or Family Polypodiaceae.

[0146] In some embodiments the PtIP-83 polypeptide is derived from a fern species in the Order Polypodiales, Family Pteridaceae, Genus Adiantaceae selected from but not limited to Adiantum aethiopicum, Adiantum aleuticum, Adiantum bonatianum, Adiantum cajennense, Adiantum capillus-junonis, Adiantum capillus-veneris, Adiantum caudatum, Adiantum chienii, Adiantum chilense, Adiantum cuneatum, Adiantum cunninghamii, Adiantum davidii, Adiantum diaphanum, Adiantum edentulum, Adiantum edgeworthii, Adiantum excisum, Adiantum fengianum, Adiantum fimbriatum, Adiantum flabellulatum, Adiantum formosanum, Adiantum formosum, Adiantum fulvum, Adiantum gravesii, Adiantum hispidulum, Adiantum induratum, Adiantum jordanii, Adiantum juxtapositum, Adiantum latifolium, Adiantum leveillei, Adiantum lianxianense, Adiantum malesianum, Adiantum mariesii, Adiantum monochlamys, Adiantum myriosorum, Adiantum obliquum, Adiantum ogasawarense, Adiantum pedatum, Adiantum pentadactylon, Adiantum peruvianum, Adiantum philippense, Adiantum princeps, Adiantum pubescens, Adiantum raddianum, Adiantum reniforme, Adiantum roborowskii, Adiantum serratodentatum, Adiantum sinicum, Adiantum soboliferum, Adiantum subcordatum, Adiantum tenerum, Adiantum terminatum, Adiantum tetraphyllum, Adiantum trapeziforme, Adiantum venustum, Adiantum viridescens, and Adiantum viridimontanum.

[0147] In some embodiments the PtIP-83 polypeptide is derived from a fern species in the Order Polypodiales, Family Aspleniaceae, Genus Asplenium.

[0148] In some embodiments the PtIP-83 polypeptide is derived from a fern species in the Order Polypodiales, Family Aspleniaceae, Genus Aspleniuml selected from but not limited to Asplenium adiantum, Asplenium adulterinum, Asplenium aequibasis, Asplenium aethiopicum, Asplenium africanum, Asplenium x altemifolium, Asplenium angustum, Asplenium antiquum, Asplenium ascensionis, Asplenium attenuatum, Asplenium aureum, Asplenium auritum, Asplenium australasicum, Asplenium azoricum, Asplenium bifrons, Asplenium billottii, Asplenium bipinnatifidum, Asplenium brachycarpum, Asplenium bradleyi, Asplenium bulbiferum, Asplenium caudatum, Asplenium ceterach, Asplenium cornpressum, Asplenium congestum, Asplenium corderoanum, Asplenium crinicaule, Asplenium cristatum, Asplenium cuneifolium, Asplenium cymbifolium, Asplenium daghestanicum, Asplenium dalhousiae, Asplenium dareoides, Asplenium daucifolium, Asplenium difforme, Asplenium fissura, Asplenium dimorphum, Asplenium divaricatum, Asplenium dregeanum, Asplenium x ebenoides, Asplenium ecuadorense, Asplenium feei Kunze, Asplenium fissura, Asplenium flabellifolium, Asplenium flaccidum, Asplenium fontanum, Asplenium forisiense, Asplenium formosum, Asplenium gemmiferum, Asplenium x germanicum, Asplenium gueinzii, Asplenium goudeyi, Asplenium hemionitis, Asplenium hermannii-christii, Asplenium hookerianum, Asplenium hybridum, Asplenium incisum, Asplenium x jacksonii, Asplenium x kenzoi, Asplenium laciniatum, Asplenium lamprophyllum, Asplenium laserpitiifolium, Asplenium lepidum, Asplenium fisteri, Asplenium longissimum, Asplenium lucidum, Asplenium lunulatum, Asplenium lyallii, Asplenium macedonicum, Asplenium majoricum, Asplenium marinum, Asplenium x microdon, Asplenium milnei Carruth, Asplenium montanum, Asplenium musifolium, Asplenium nidus, Asplenium normale, Asplenium obliquum, Asplenium oblongifolium, Asplenium obovatum, Asplenium obtusatum, Asplenium oligolepidum, Asplenium oligophlebium, Asplenium onopteris, Asplenium pacificum, Asplenium paleaceum, Asplenium palmeri, Asplenium petrarchae, Asplenium pinnatifidum, Asplenium planicaule, Asplenium platybasis, Asplenium platyneuron, Asplenium polyodon, Asplenium praemorsum, Asplenium prolongatum, Asplenium pteridoides, Asplenium resiliens, Asplenium rhizophyllum, Asplenium richardii, Asplenium ruprechtii, Asplenium ruta-muraria, Asplenium rustifolium, Asplenium sagittatum, Asplenium sandersonii, Asplenium x sarniense, Asplenium schizotrichum, Asplenium schweinfurthii, Asplenium scleroprium, Asplenium scolopendrium (syn. Phyllitis scolopendrium), Asplenium seelosii, Asplenium septentrionale, Asplenium septentrionale x trichomanes, Asplenium serra, Asplenium serratum, Asplenium sessilifolium, Asplenium shuttleworthianum, Asplenium simplicifrons, Asplenium splendens, Asplenium surrogatum, Asplenium tenerum, Asplenium terrestre, Asplenium theciferum, Asplenium thunbergii, Asplenium trichomanes, Asplenium tutwilerae, Asplenium vespertinum, Asplenium vieillardii, Asplenium virens, Asplenium viride, Asplenium vittiforme, and Asplenium viviparum.

[0149] In some embodiments the PtIP-83 polypeptide is derived from a fern species in the Order Polypodiales, Family Blechnaceae, Genus Blecnum.

[0150] In some embodiments the the PtIP-83 polypeptide is derived from a fern species in the Order Polypodiales, Family Dryopteridaceae Genus Acrophorus, Genus Acrorumohra, Genus Anapausia, Genus Arachniodes, Genus Bolbitis, Genus Ctenitis, Genus Cyclodium, Genus Cyrtogonellum, Genus Cyrtomidictyum, Genus Cyrtomium, Genus Diacalpe, Genus Didymochlaena, Genus Dryopsis, Genus Dryopteris, Genus Elaphoglossum, Genus Hypodematium, Genus Lastreopsis, Genus Leptorumohra, Genus Leucostegia, Genus Lithostegia, Genus Lomagramma, Genus Maxonia, Genus Megalastrum, Genus Olfersia, Genus Peranema, Genus Phanerophlebia, Genus Phanerophlebiopsis, Genus Polybotrya, Genus Polystichopsis, Genus Polystichum, Genus Rumohra, Genus Sorolepidium, Genus Stigmatopteris or Genus Teratophyllum.

[0151] In some embodiments the PtIP-83 polypeptide is derived from a fern species in the Order Polypodiales, Family Dryopteridaceae, Genus Polystichum. In some embodiments the nucleic acid molecule encoding the PtIP-83 polypeptide is derived from a fern species in the Order Polypodiales, Family Dryopteridaceae, Genus Polystichum selected from but not limited to Polystichum acanthophyllum, Polystichum acrostichoides, Polystichum aculeatum, Polystichum acutidens, Polystichum acutipinnulum, Polystichum alcicorne, Polystichum aleuticum, Polystichum andersonii, Polystichum atkinsonii, Polystichum australiense, Polystichum bakerianum, Polystichum biaristatum, Polystichum bomiense, Polystichum bonseyi, Polystichum brachypterum, Polystichum braunii, Polystichum brachypterum, Polystichum calderonense, Polystichum californicum, Polystichum capillipes, Polystichum castaneum, Polystichum chilense, Polystichum christii Ching, Polystichum chunii Ching, Polystichum craspedosorum, Polystichum cyclolobum, Polystichum cystostegia, Polystichum deltodon, Polystichum dielsii, Polystichum discretum, Polystichum drepanum, Polystichum dudleyi, Polystichum duthiei, Polystichum echinatum, Polystichum erosum, Polystichum excellens, Polystichum eximium, Polystichum falcatipinnum, Polystichum falcinellum, Polystichum fallax, Polystichum formosanum, Polystichum gongboense, Polystichum grandifrons, Polystichum gymnocarpium, Polystichum haleakalense, Polystichum hancockii, Polystichum hecatopteron, Polystichum herbaceum, Polystichum imbricans, Polystichum incongruum, Polystichum kruckebergii, Polystichum kwakiutlii, Polystichum lachenense, Polystichum lanceolatum, Polystichum lemmonii, Polystichum lentum, Polystichum lonchitis, Polystichum longidens, Polystichum longipaleatum, Polystichum longipes, Polystichum luctuosum, Polystichum macleae, Polystichum macrochlaenum, Polystichum makinoi, Polystichum martini, Polystichum mayebarae, Polystichum mediocre, Polystichum medogense, Polystichum microchlamys, Polystichum mohrioides, Polystichum mollissimum, Polystichum monticola, Polystichum moorei, Polystichum morii, Polystichum moupinense, Polystichum muricatum, Polystichum nakenense, Polystichum neolobatum, Polystichum nepalense, Polystichum ningshenense, Polystichum obliquum, Polystichum omeiense, Polystichum ordinatum, Polystichum orientalitibeticum, Polystichum paramoupinense, Polystichum parvipinnulum, Polystichum piceopaleaceum, Polystichum polyblepharum, Polystichum prescottianum, Polystichum prionolepis, Polystichum proliferum, Polystichum pseudocastaneum¹, Polystichum pseudomakinoi, Polystichum punctiferum, Polystichum pungens, Polystichum qamdoense, Polystichum retrosopaleaceum, Polystichum rhombiforme, Polystichum rhomboidea, Polystichum richardii, Polystichum rigens, Polystichum rotundilobum, Polystichum scopulinum, Polystichum semifertile, Polystichum setiferum, Polystichum setigerum, Polystichum shensiense, Polystichum silvaticum, Polystichum simplicipinnum, Polystichum sinense, Polystichum squarrosum, Polystichum stenophyllum, Polystichum stimulans, Polystichum submite, Polystichum tacticopterum, Polystichum thomsoni, Polystichum tibeticum, Polystichum transvaalense, Polystichum tripteron, Polystichum tsus-simense, Polystichum vestitum, Polystichum wattii, Polystichum whiteleggei, Polystichum xiphophyllum, Polystichum yadongense, and Polystichum yunnanense.

[0152] In some embodiments the PtIP-83 polypeptide is derived from a fern species in the Order Polypodiales, Family Dryopteridaceae, Genus Rumohra. In some embodiments the nucleic acid molecule encoding the PtIP-83 polypeptide is derived from a fern species in the Order Polypodiales, Family Dryopteridaceae, Genus Rumohra selected from but not limited to Rumohra adiantiformis, Rumohra aristata, Rumohra bartonae, Rumohra berteroana, Rumohra capuronii, Rumohra glandulosa, Rumohra humbertii, Rumohra linearisquamosa, Rumohra lokohensis, Rumohra madagascarica, and Rumohra quadrangularis.

[0153] In some embodiments the PtIP-83 polypeptide is derived from a fern species in the Order Polypodiales, Family Lomariopsidaceae, Genus Nephrolepis.

[0154] In some embodiments the PtIP-83 polypeptide is derived from a fern species in the Order Polypodiales, Family Polypodiaceae, Genus Campyloneurum, Genus Drynaria, Genus Lepisorus, Genus Microgramma, Genus Microsorum, Genus Neurodium, Genus Niphidium, Genus Pecluma M.G., Genus Phlebodium, Genus Phymatosorus, Genus Platycerium, Genus Pleopeltis, Genus Polypodium.

[0155] In some embodiments the PtIP-83 polypeptide is derived from a fern species in the Order Polypodiales, Family Polypodiaceae, Genus Microsorum.

[0156] In some embodiments the PtIP-83 polypeptide is derived from a fern species in the Order Polypodiales, Family Polypodiaceae, Genus Microsorum selected from but not limited to Microsorum alatum, Microsorum angustifolium, Microsorum aurantiacum, Microsorum australiense, Microsorum baithoense, Microsorum basicordatum, Microsorum biseriatum, Microsorum brassii, Microsorum buergerianum, Microsorum chapaense, Microsorum cinctum, Microsorum commutatum, Microsorum congregatifolium, Microsorum cuneatum, Microsorum cuspidatum, Microsorum dengii, Microsorum egregium, Microsorum emeiensis, Microsorum ensatum, Microsorum ensiforme, Microsorum excelsum, Microsorum fortunei, Microsorum griseorhizoma, Microsorum grossum, Microsorum hemionitideum, Microsorum henryi, Microsorum heterocarpum, Microsorum heterolobum, Microsorum howense, Microsorum insigne, Microsorum intermedium, Microsorum kongtingense, Microsorum krayanense, Microsorum lanceolatum, Microsorum lancifolium, Microsorum lastii, Microsorum latilobatum, Microsorum leandrianum, Microsorum lineare, Microsorum linguiforme, Microsorum longissimum, Microsorum longshengense, Microsorum maculosum, Microsorum maximum, Microsorum membranaceum, Microsorum membranifolium, Microsorum microsorioides, Microsorum minor, Microsorum monstrosum, Microsorum muliense, Microsorum mutense, Microsorum nanchuanense, Microsorum ningpoense, Microsorum normale, Microsorum novae-zealandiae, Microsorum ovalifolium, Microsorum ovatum, Microsorum palmatopedatum, Microsorum pappei, Microsorum papuanum, Microsorum parksii, Microsorum pentaphyllum, Microsorum piliferum, Microsorum pitcairnense, Microsorum powellii, Microsorum pteropodum, Microsorum pteropus, Microsorum punctatum, Microsorum pustulatum, Microsorum rampans, Microsorum revolutum, Microsorum rubidum, Microsorum samarense, Microsorum sapaense, Microsorum sarawakense, Microsorum scandens, Microsorum scolopendria, Microsorum sibomense, Microsorum sinense, Microsorum sopuense, Microsorum spectrum, Microsorum steerei, Microsorum subhemionitideum, Microsorum submarginale, Microsorum subnudum, Microsorum superficiale, Microsorum takhtajanii, Microsorum tenuipes, Microsorum tibeticum, Microsorum triglossum, Microsorum truncatum, Microsorum tsaii, Microsorum varians, Microsorum venosum, Microsorum vieillardii, Microsorum x inaequibasis, Microsorum yiliangensis, and Microsorum zippelii.

[0157] In some embodiments the PtIP-83 polypeptide is derived from a fern species in the Order Polypodiales, Family Polypodiaceae, Genus Polypodium L.

[0158] In some embodiments the PtIP-83 polypeptide is derived from a fern species in the Order Polypodiales, Family Polypodiaceae, Genus Polypodium L. selected from but not limited to Polypodium absidatum, Polypodium acutifolium, Polypodium adiantiforme, Polypodium aequale, Polypodium affine, Polypodium albidopaleatum, Polypodium alcicorne, Polypodium alfarii, Polypodium alfredii, Polypodium alfredii var. curtii, Polypodium allosuroides, Polypodium alsophilicola, Polypodium amamianum, Polypodium amoenum, Polypodium amorphum, Polypodium anetioides, Polypodium anfractuosum, Polypodium anguinum, Polypodium angustifolium f. remotifolia, Polypodium angustifolium var. amphostenon, Polypodium angustifolium var. heterolepis, Polypodium angustifolium var. monstrosa, Polypodium angustipaleatum, Polypodium angustissimum, Polypodium anisomeron var. pectinatum, Polypodium antioquianum, Polypodium aoristisorum, Polypodium apagolepis, Polypodium apicidens, Polypodium apiculatum, Polypodium apoense, Polypodium appalachianum, Polypodium appressum, Polypodium arenarium, Polypodium argentinum, Polypodium argutum, Polypodium armatum, Polypodium aromaticum, Polypodium aspersum, Polypodium assurgens, Polypodium atrum, Polypodium auriculatum, Polypodium balaonense, Polypodium balliviani, Polypodium bamleri, Polypodium bangii, Polypodium bartlettii, Polypodium basale, Polypodium bemoullii, Polypodium biauritum, Polypodium bifrons, Polypodium blepharodes, Polypodium bolivari, Polypodium bolivianum, Polypodium bolobense, Polypodium bombycinum, Polypodium bombycinum var. insularum, Polypodium bradeorum, Polypodium bryophilum, Polypodium bryopodum, Polypodium buchtienii, Polypodium buesii, Polypodium bulbotrichum, Polypodium caceresii, Polypodium californicum f. brauscombii, Polypodium californicum f. parsonsiae, Polypodium californicum, Polypodium calophlebium, Polypodium calvum, Polypodium camptophyllarium var. abbreviatum, Polypodium capitellatum, Polypodium carpinterae, Polypodium chachapoyense, Polypodium chartaceum, Polypodium chimantense, Polypodium chiricanum, Polypodium choquetangense, Polypodium christensenii, Polypodium christii, Polypodium chrysotrichum, Polypodium ciliolepis, Polypodium cinerascens, Polypodium collinsii, Polypodium colysoides, Polypodium confluens, Polypodium conforme, Polypodium confusum, Polypodium congregatifolium, Polypodium connellii, Polypodium consimile var. bourgaeanum, Polypodium consimile var. minor, Polypodium conterminans, Polypodium contiguum, Polypodium cookii, Polypodium coriaceum, Polypodium coronans, Polypodium costaricense, Polypodium costatum, Polypodium crassifolium f. angustissimum, Polypodium crassifolium var. longipes, Polypodium crassulum, Polypodium craterisorum, Polypodium cryptum, Polypodium crystalloneuron, Polypodium cucullatum var. planum, Polypodium cuencanum, Polypodium cumingianum, Polypodium cupreolepis, Polypodium curranii, Polypodium curvans, Polypodium cyathicola, Polypodium cyathisorum, Polypodium cyclocolpon, Polypodium daguense, Polypodium damunense, Polypodium dareiformioides, Polypodium dasypleura, Polypodium decipiens, Polypodium decorum, Polypodium delicatulum, Polypodium deltoideum, Polypodium demeraranum, Polypodium denticulatum, Polypodium diaphanum, Polypodium dilatatum, Polypodium dispersum, Polypodium dissectum, Polypodium dissimulans, Polypodium dolichosorum, Polypodium dolorense, Polypodium donnell-smithii, Polypodium drymoglossoides, Polypodium ebeninum, Polypodium eggersii, Polypodium elmeri, Polypodium elongatum, Polypodium enterosoroides, Polypodium erubescens, Polypodium erythrolepis, Polypodium erythrotrichum, Polypodium eurybasis, Polypodium eurybasis var. villosum, Polypodium exornans, Polypodium falcoideum, Polypodium fallacissimum, Polypodium farinosum, Polypodium faucium, Polypodium feei, Polypodium ferrugineum, Polypodium feuillei, Polypodium firmulum, Polypodium firmum, Polypodium flaccidum, Polypodium flagellare, Polypodium flexuosum, Polypodium flexuosum var. ekmanii, Polypodium forbesii, Polypodium formosanum, Polypodium fraxinifolium subsp. articulatum, Polypodium fraxinifolium subsp. luridum, Polypodium fructuosum, Polypodium fucoides, Polypodium fulvescens, Polypodium galeottii, Polypodium glaucum, Polypodium glycyrrhiza, Polypodium gracillimum, Polypodium gramineum, Polypodium grandifolium, Polypodium gratum, Polypodium graveolens, Polypodium griseo-nigrum, Polypodium griseum, Polypodium guttatum, Polypodium haalilioanum, Polypodium hammatisorum, Polypodium hancockii, Polypodium haplophiebicum, Polypodium harrisii, Polypodium hastatum var. simplex, Polypodium hawaiiense, Polypodium heanophyllum, Polypodium helleri, Polypodium hemionitidium, Polypodium henryi, Polypodium herzogii, Polypodium hesperium, Polypodium hessii, Polypodium hombersleyi, Polypodium hostmannii, Polypodium humile, Polypodium hyalinum, Polypodium iboense, Polypodium induens var. subdentatum, Polypodium insidiosum, Polypodium insigne, Polypodium intermedium subsp. masafueranum var. obtuseserratum, Polypodium intramarginale, Polypodium involutum, Polypodium itatiayense, Polypodium javanicum, Polypodium juglandifolium, Polypodium kaniense, Polypodium knowltoniorum, Polypodium kyimbilense, Polypodium l'herminieri var. costaricense, Polypodium lachniferum f. incurvata, Polypodium lachniferum var. glabrescens, Polypodium lachnopus, Polypodium lanceolatum var. complanatum, Polypodium lanceolatum var. trichophorum, Polypodium latevagans, Polypodium laxifrons, Polypodium laxifrons var. lividum, Polypodium lehmannianum, Polypodium leiorhizum, Polypodium leptopodon, Polypodium leuconeuron var. angustifolia, Polypodium leuconeuron var. latifolium, Polypodium leucosticta, Polypodium limulum, Polypodium lindigii, Polypodium lineatum, Polypodium lomarioides, Polypodium longifrons, Polypodium loretense, Polypodium loriceum var. umbraticum, Polypodium loriforme, Polypodium loxogramme f. gigas, Polypodium ludens, Polypodium luzonicum, Polypodium lycopodioides f. obtusum, Polypodium lycopodioides L., Polypodium macrolepis, Polypodium macrophyflum, Polypodium macrosorum, Polypodium macrosphaerum, Polypodium maculosum, Polypodium madrense, Polypodium manmeiense, Polypodium margaritiferum, Polypodium maritimum, Polypodium martensii, Polypodium mayoris, Polypodium megalolepis, Polypodium melanotrichum, Polypodium menisciifolium var. pubescens, Polypodium meniscioides, Polypodium merrillii, Polypodium mettenii, Polypodium mexiae, Polypodium microsorum, Polypodium militare, Polypodium minimum, Polypodium minusculum, Polypodium mixtum, Polypodium mollendense, Polypodium mollissimum, Polypodium moniliforme var. minus, Polypodium monoides, Polypodium monticola, Polypodium montigenum, Polypodium moritzianum, Polypodium moultonii, Polypodium multicaudatum, Polypodium multilineatum, Polypodium multisorum, Polypodium munchii, Polypodium muscoides, Polypodium myriolepis, Polypodium myriophyllum, Polypodium myriotrichum, Polypodium nematorhizon, Polypodium nemorale, Polypodium nesioticum, Polypodium nigrescentium, Polypodium nigripes, Polypodium nigrocinctum, Polypodium nimbatum, Polypodium nitidissimum, Polypodium nitidissimum var. latior, Polypodium nubrigenum, Polypodium oligolepis, Polypodium oligosorum, Polypodium oligosorum, Polypodium olivaceum, Polypodium olivaceum var. elatum, Polypodium oodes, Polypodium oosphaerum, Polypodium oreophilum, Polypodium ornatissimum, Polypodium ornatum, Polypodium ovatum, Polypodium oxylobum, Polypodium oxypholis, Polypodium pakkaense, Polypodium pallidum, Polypodium palmatopedatum, Polypodium palmeri, Polypodium panamense, Polypodium parvum, Polypodium patagonicum, Polypodium paucisorum, Polypodium pavonianum, Polypodium pectinatum var. caliense, Polypodium pectinatum var. hispidum, Polypodium pellucidum, Polypodium pendulum var. boliviense, Polypodium percrassum, Polypodium perpusillum, Polypodium peruvianum var. subgibbosum, Polypodium phyllitidis var. elongatum, Polypodium pichinchense, Polypodium pilosissimum, Polypodium pilosissimum var. glabriusculum, Polypodium pilossimum var. tunguraquensis, Polypodium pityrolepis, Polypodium platyphyllum, Polypodium playfairii, Polypodium plebeium var. cooperi, Polypodium plectolepidioides, Polypodium pleolepis, Polypodium plesiosorum var. i, Polypodium podobasis, Polypodium podocarpum, Polypodium poloense, Polypodium polydatylon, Polypodium polypodioides var. aciculare, Polypodium polypodioides var. michauxianum, Polypodium praetermissum, Polypodium preslianum var. immersum, Polypodium procerum, Polypodium procerum, Polypodium productum, Polypodium productum, Polypodium prolongilobum, Polypodium propinguum, Polypodium proteus, Polypodium pruinatum, Polypodium pseudocapillare, Polypodium pseudofratemum, Polypodium pseudonutans, Polypodium pseudoserratum, Polypodium pulcherrimum, Polypodium pulogense, Polypodium pungens, Polypodium purpusii, Polypodium radicale, Polypodium randallii, Polypodium ratiborii, Polypodium reclinatum, Polypodium recreense, Polypodium repens var. abruptum, Polypodium revolvens, Polypodium rhachipterygium, Polypodium rhomboideum, Polypodium rigens, Polypodium robustum, Polypodium roraimense, Polypodium roraimense, Polypodium rosei, Polypodium rosenstockii, Polypodium rubidum, Polypodium rudimentum, Polypodium rusbyi, Polypodium sablanianum, Polypodium sarmentosum, Polypodium saxicola, Polypodium schenckii, Polypodium schlechteri, Polypodium scolopendria, Polypodium scolopendria, Polypodium scolopendrium, Polypodium scouleri, Polypodium scutulatum, Polypodium segregatum, Polypodium semihirsutum, Polypodium semihirsutum var. fuscosetosum, Polypodium senile var. minor, Polypodium sericeolanatum, Polypodium serraeforme, Polypodium serricula, Polypodium sesquipedala, Polypodium sessilifolium, Polypodium setosum var. calvum, Polypodium setulosum, Polypodium shaferi, Polypodium sibomense, Polypodium siccum, Polypodium simacense, Polypodium simulans, Polypodium singeri, Polypodium sinicum, Polypodium sintenisii, Polypodium skutchii, Polypodium sloanei, Polypodium sodiroi, Polypodium sordidulum, Polypodium sordidum, Polypodium sphaeropteroides, Polypodium sphenodes, Polypodium sprucei, Polypodium sprucei var. furcativenosa, Polypodium steirolepis, Polypodium stenobasis, Polypodium stenolepis, Polypodium stenopterum, Polypodium subcapillare, Polypodium subflabelliforme, Polypodium subhemionitidium, Polypodium subinaequale, Polypodium subintegrum, Polypodium subspathulatum, Polypodium subtile, Polypodium subvestitum, Polypodium subviride, Polypodium superficiale var. attenuatum, Polypodium superficiale var. chinensis, Polypodium sursumcurrens, Polypodium tablazianum, Polypodium taenifolium, Polypodium tamandarei, Polypodium tatei, Polypodium tenuiculum var. acrosora, Polypodium tenuiculum var. brasiliense, Polypodium tenuilore, Polypodium tenuinerve, Polypodium tepuiense, Polypodium teresae, Polypodium tetragonum var. incompletum, Polypodium thysanolepis var. bipinnatifidum, Polypodium thyssanolepis, var. thyssanolepis, Polypodium thyssanolepsi, Polypodium tobagense, Polypodium trichophyllum, Polypodium tridactylum, Polypodium tridentatum, Polypodium trifurcatum var. brevipes, Polypodium triglossum, Polypodium truncatulum, Polypodium truncicola var. major, Polypodium truncicola var. minor, Polypodium tuberosum, Polypodium tunguraguae, Polypodium turquinum, Polypodium turrialbae, Polypodium ursipes, Polypodium vagans, Polypodium valdealatum, Polypodium versteegii, Polypodium villagranii, Polypodium virginianum f. cambroideum, Polypodium virginianum f. peraferens, Polypodium vittarioides, Polypodium vulgare, Polypodium vulgare L., Polypodium vulgare subsp. oreophilum, Polypodium vulgare var. acuminatum, Polypodium vulpinum, Polypodium williamsii, Polypodium wobbense, Polypodium x fallacissimum-guttatum, Polypodium xantholepis, Polypodium xiphopteris, Polypodium yarumalense, Polypodium yungense, and Polypodium zosteriforme.

[0159] In some embodiments the PtIP-83 polypeptide is derived from a fern species in the Order Polypodiales, Family Polypodiaceae, Genus Platycerium.

[0160] In some embodiments the PtIP-83 polypeptide is derived from a species in the Division Lycophyta.

[0161] In some embodiments the PtIP-83 polypeptide is derived from a species in the Class Isoetopsida or Class Lycopodiopsida.

[0162] In some embodiments the PtIP-83 polypeptide is derived from a species in the Class Isoetopsida Order Selaginales. In some embodiments the PtIP-83 polypeptide is derived from a fern species in the Class Isoetopsida, Order Selaginales, Family Selaginellaceae. In some embodiments the PtIP-83 polypeptide is derived from a species in the Genus Selaginella. In some embodiments the PtIP-83 polypeptide is derived from a species in the Class Lycopodiopsida, Order Lycopodiales.

[0163] In some embodiments the PtIP-83 polypeptide is derived from a fern species in the Class Lycopodiopsida, Order Lycopodiales Family Lycopodiaceae or Family Huperziaceae.

[0164] In some embodiments the PtIP-83 polypeptide is derived from a species in the Genus Austrolycopodium, Dendrolycopodium, Diphasiastrum, Diphasium, Huperzia, Lateristachys, Lycopodiastrum, Lycopodiella, Lycopodium, Palhinhaea, Pseudodiphasium, Pseudolycopodiella, Pseudolycopodium or Spinulum.

[0165] In some embodiments the PtIP-83 polypeptide is derived from a species in the Genus Lycopodium.

[0166] In some embodiments the PtIP-83 polypeptide is derived from a species in the Genus Huperzia.

### Phylogenetic, Sequence Motif, and Structural Analyses for Insecticidal Protein Families

[0167] The sequence and structure analysis method employed is composed of four components: phylogenetic tree construction, protein sequence motifs finding, secondary structure prediction, and alignment of protein sequences and secondary structures. Details about each component are illustrated below.

### Phylogenetic Tree Construction

[0168] The phylogenetic analysis was performed using the software MEGA5. Protein sequences were subjected to ClustalW version 2 analysis (Larkin M. A et al (2007) Bioinformatics 23(21): 2947-2948) for multiple sequence alignment. The evolutionary history was then inferred by the Maximum Likelihood method based on the JTT matrix-based model. The tree with the highest log likelihood was obtained, exported in Newick format, and further processed to extract the sequence IDs in the same order as they appeared in the tree. A few clades representing sub-families were manually identified for each insecticidal protein family.

### Protein Sequence Motifs Finding

[0169] Protein sequences were re-ordered according to the phylogenetic tree built previously, and fed to the MOTIF analysis tool MEME (Multiple EM for MOTIF Elicitation) (Bailey T. L., and Elkan C., Proceedings of the Second International Conference on Intelligent Systems for Molecular Biology, pp. 28-36, AAAI Press, Menlo Park, Calif., 1994.) for identification of key sequence motifs. MEME was setup as follows: Minimum number of sites 2, Minimum motif width 5, and Maximum number of motifs 30. Sequence motifs unique to each sub-family were identified by visual observation. The distribution of MOTIFs across the entire gene family could be visualized in HTML webpage. The MOTIFs are numbered relative to the ranking of the E-value for each MOTIF. The amino acid sequence MOTIFs identified for each of the PtIP-83 polypeptides and the residue ranges defining the MOTIFs relative to each of the corresponding sequence identifier (SEQ ID NO:) are shown in Table 2. FIG. 2 shows an alignment of the PtIP-83 polypeptides PtIP-83Aa (SEQ ID NO: 1), PtIP-83Ca (SEQ ID NO: 5), PtIP-83Cb (SEQ ID NO: 7), PtIP-83Cc (SEQ ID NO: 9), PtIP-83Cd (SEQ ID NO: 11), PtIP-83Ce (SEQ ID NO: 13), PtIP-83Cf (SEQ ID NO: 15), and PtIP-83Fa (SEQ ID NO: 3), and the location relative to PtIP-83Aa (SEQ ID NO: 1) of the amino acid sequence MOTIFs present in PtIP-83Aa (SEQ ID NO: 1).

### Secondary Structure Prediction

[0170] PSIPRED, top ranked secondary structure prediction method (Jones D T. (1999) J. Mol. Biol. 292: 195-202), was installed in local Linux server, and used for protein secondary structure prediction. The tool provides accurate structure prediction using two feed-forward neural networks based on the PSI-BLAST output. The PSI-BLAST database was created by removing low-complexity, transmembrane, and coiled-coil regions in Uniref100. The PSIPRED results contain the PtIP-secondary structures (Alpha helix: H, Beta strand: E, and Coil: C) and the corresponding confidence scores for each amino acid in a given protein sequence. FIG. 2 shows the PtIP-83 polypeptide amino acid sequence alignments and the conserved secondary structural regions.

TABLE 2

| | SEQ ID | | | | | | |
|---|---|---|---|---|---|---|---|
| | NO: | MOTIF 19 | MOTIF 7 | MOTIF 13 | MOTIF 20 | MOTIF 10 | MOTIF 18 |
| PtIP-83Aa | 1 | 4-17 | 21-64 | 71-100 | 102-120 | n. p. | n. p. |
| PtIP-83Ca | 5 | 1-14 | 17-60 | 68-97 | 98-116 | 122-171 | 173-208 |
| PtIP-83Cb | 7 | 1-14 | 17-60 | 69-98 | n. p. | 121-170 | n. p. |
| PtIP-83Cc | 9 | 1-14 | 17-60 | 68-97 | 98-116 | 122-171 | 173-208 |
| PtIP-83Cd | 11 | 1-14 | 17-60 | 68-97 | 98-116 | 122-171 | 173-208 |
| PtIP-83Ce | 13 | 1-14 | 17-60 | 68-97 | 98-116 | 121-170 | 173-208 |
| PtIP-83Cf | 15 | 1-14 | 21-64 | 68-97 | 98-116 | 122-171 | n. p. |
| PtIP-83Fa | 3 | 5-18 | 17-60 | 68-97 | n. p. | n. p. | n. p. |
| | SEQ ID | | | | | | |
| | NO: | MOTIF 24 | MOTIF 14 | MOTIF 11 | MOTIF 22 | MOTIF 2 | MOTIF 8 |
| PtIP-83Aa | 1 | n. p. | 238-263 | n. p. | 313-326 | 327-376 | 376-425 |
| PtIP-83Ca | 5 | 211-220 | 221-246 | 248-297 | 298-311 | 312-361 | 362-411 |
| PtIP-83Cb | 7 | n. p. | 223-248 | 249-298 | 299-312 | 313-362 | 363-412 |
| PtIP-83Cc | 9 | 211-220 | 221-246 | 248-297 | 298-311 | 312-361 | 362-411 |
| PtIP-83Cd | 11 | 211-220 | 221-246 | 248-297 | 298-311 | 312-361 | 362-411 |
| PtIP-83Ce | 13 | 211-220 | 221-246 | 248-297 | 298-311 | 312-361 | 362-411 |
| PtIP-83Cf | 15 | 211-220 | 221-246 | 248-297 | 298-311 | 312-361 | 362-411 |
| PtIP-83Fa | 3 | 247-256 | 262-287 | n. p. | 329-342 | 344-393 | 394-443 |
| | SEQ ID | | | | | | |
| | NO: | MOTIF 21 | MOTIF 15 | MOTIF 9 | MOTIF 1 | MOTIF 17 | MOTIF 6 |
| PtIP-83Aa | 1 | 508-521 | 428-453 | 455-504 | 523-572 | 576-594 | 596-645 |
| PtIP-83Ca | 5 | 493-506 | 413-438 | 441-490 | 508-557 | 561-579 | 581-630 |
| PtIP-83Cb | 7 | 494-507 | 414-439 | 442-491 | 509-558 | 562-580 | 582-631 |
| PtIP-83Cc | 9 | 493-506 | 413-438 | 441-490 | 508-557 | 561-579 | 581-630 |
| PtIP-83Cd | 11 | 493-506 | 413-438 | 441-490 | 508-557 | 561-579 | 581-630 |
| PtIP-83Ce | 13 | 493-506 | 413-438 | 441-490 | 508-557 | 561-579 | 581-630 |
| PtIP-83Cf | 15 | 493-506 | 413-438 | 441-490 | 508-557 | 561-579 | 581-630 |
| PtIP-83Fa | 3 | 525-538 | 445-470 | 473-522 | 540-589 | 593-611 | 613-662 |
| | SEQ ID | | | | | | |
| | NO: | MOTIF 12 | MOTIF 4 | MOTIF 16 | MOTIF 5 | MOTIF 23 | MOTIF 3 |
| PtIP-83Aa | 1 | 648-683 | 684-719 | 723-741 | 746-795 | 798-807 | 809-858 |
| PtIP-83Ca | 5 | 634-669 | 670-705 | 708-726 | 732-781 | 784-793 | 795-844 |
| PtIP-83Cb | 7 | 635-670 | 671-706 | 709-727 | 731-780 | 783-792 | 794-843 |
| PtIP-83Cc | 9 | 634-669 | 670-705 | 708-726 | 730-779 | 782-791 | 793-842 |
| PtIP-83Cd | 11 | 634-669 | 670-705 | 708-726 | 730-779 | 782-791 | 793-842 |
| PtIP-83Ce | 13 | 634-669 | 670-705 | 708-726 | 730-779 | 782-791 | 793-842 |
| PtIP-83Cf | 15 | 634-669 | 670-705 | 708-726 | 731-780 | 783-792 | 794-843 |
| PtIP-83Fa | 3 | 667-702 | 703-738 | 740-758 | 763-812 | 815-824 | 826-875 |

n.p. = not present

### Alignment of Protein Sequences and Secondary Structures

[0171] A customized script was developed to generate gapped secondary structure alignment according to the multiple protein sequence alignment from step 1 for all proteins. All aligned protein sequences and structures were concatenated into a single FASTA file, and then imported into MEGA for visualization and identification of conserved structures.

[0172] In some embodiments a PtIP-83 polypeptide comprises an amino acid sequence MOTIF selected from: an amino acid sequence MOTIF 1 as represented by an amino acid sequence of the formula MP[DE]MPSEADWSIFVNE[IV]EAVAEGMPTEVSEVP[AV]WKAKCKN[MV]AALGREM[SC]I (SEQ ID NO: 646); an amino acid sequence MOTIF 2 as represented by an amino acid sequence of the formula PQLQYRMYG[NS]LI[KN]QMAQVAQNYDQ[ED]FKQ[FL]KLFI[IA]QNQI[LF]GSYLLQQN[KR]A F (SEQ ID NO: 647); an amino acid sequence MOTIF 3 as represented by an amino acid sequence of the formula NTFMQMTPFTRWRLRLSASASENA[EG]LAFPTATA[PL]DSTT[EQ][IV]VITFHVTAIR (SEQ ID NO: 648); an amino acid sequence MOTIF 4 as represented by an amino acid sequence of the formula [DN]FTSRHVVK[GD]IPVSLLLDGEDWEFEIPVQ[AG]GMSSFP (SEQ ID NO: 649); an amino acid sequence MOTIF 5 as represented by an amino acid sequence of the formula IIHQP[SA]T[RQ][ST]G[IT]VYILLQGSTIFHDRRR[DE]EVMTFQAA[DA]PLN[FY][QH]YAYRLDT G (SEQ ID NO: 650); an amino acid sequence MOTIF 6 as represented by an amino acid sequence of the formula S[HQ]ADRLAAIQP[AV]DLTN[HY]LEMAT[HQ]MDMRTT[RS][MI]L[IL]GLLN[MI]LRIQNAALMY EY (SEQ ID NO: 651); an amino acid sequence MOTIF 7 as represented by an amino acid sequence of the formula [VL]DRVEFSEVMVIHRMYVRL[SA]DL[ND]VGEL[PE]GA[EG][RK]VKR[VL]YV[FL]ADVVE (SEQ ID NO: 652); an amino acid sequence MOTIF 8 as represented by an amino acid sequence of the formula A[DE]RELQMESFHSAVISQRRQEL[ND]TA[IF]AKM[DE]R[LM]SLQMEEE[NS]RAMEQAQKE M (SEQ ID NO: 653); an amino acid sequence MOTIF 9 as represented by an amino acid sequence of the formula FVTAGATAPGA[AV]ASAGQAVSIAGQAAQ[AG]LRRVVEILE[GQ]LEAVMEVVAA[VI]K (SEQ ID NO: 654); an amino acid sequence MOTIF 10 as represented by an amino acid sequence of the formula DGMNWG[IT]YI[YH]GE[KE]V[EQ]RSPLLPSNAILAVWADRC[TI]ITSARHNH[VF]NAPGR[IV]I (SEQ ID NO: 655); an amino acid sequence MOTIF 11 as represented by an amino acid sequence of the formula [KV][VK][CA]RPPSPDM[MV]SAVAEHALWLNDVLLQVVQ[KN]ESQ[LM]QGT[AE]PYNECLAL LGR (SEQ ID NO: 656); an amino acid sequence MOTIF 12 as represented by an amino acid sequence of the formula PTELT[VA]WPLGMDTV[AG]NLLIAQENAAL[VL]GLIQLGPSS (SEQ ID NO: 657); an amino acid sequence MOTIF 13 as represented by an amino acid sequence of the formula RDQ[MT][HQ]MPGSVTVI[IV]LCRLLQFP[IT]DGSQA[TA]T (SEQ ID NO: 658); an amino acid sequence MOTIF 14 as represented by an amino acid sequence of the formula TSIPVEVVTDP[SN]ILLGMQTTV[LH]IAEL (SEQ ID NO: 659); an amino acid sequence MOTIF as represented by an amino acid sequence of the formula EGLR[EQ]FQNRQVARA[VL]FAVLKAVA[MQ]I[AG] (SEQ ID NO: 660); an amino acid sequence MOTIF 16 as represented by an amino acid sequence of the formula W[TS]RVRIRHLEM[QH]F[AV]QEASG (SEQ ID NO: 661); an amino acid sequence MOTIF 17 as represented by an amino acid sequence of the formula QISELQY[ED]IWVQG[LM][ML]RDIA (SEQ ID NO: 662); an amino acid sequence MOTIF 18 as represented by an amino acid sequence of the formula TFTLGSGVTGITSMHGEPSLDPWNGVSLDSASPTAF (SEQ ID NO: 663); an amino acid sequence MOTIF 19 as represented by an amino acid sequence of the formula MDYSTLYRDLNQIS (SEQ ID NO: 664); an amino acid sequence MOTIF 20 as represented by an amino acid sequence of the formula LRLPFM[QK]LHARVIEQN[VR]K[SE] (SEQ ID NO: 665); an amino acid sequence MOTIF 21 as represented by an amino acid sequence of the formula VDSLEQVG[QH][IL]V[GD]AP (SEQ ID NO: 666); an amino acid sequence MOTIF 22 as represented by an amino acid sequence of the formula [IV][EQ][CA]VMK[IM]GRF[VG][SL]VV (SEQ ID NO: 667); an amino acid sequence MOTIF 23 as represented by an amino acid sequence of the formula TLTNEPSE[EQ]F (SEQ ID NO: 668); and an amino acid sequence MOTIF 24 as represented by an amino acid sequence of the formula LPRQSRNISF (SEQ ID NO: 669).

[0173] In some embodiments a PtIP-83 polypeptide comprises an amino acid sequence MOTIF selected from: an amino acid sequence MOTIF 1 having at least 90% sequence identity to the amino acid sequence as represented by the formula MP[DE]MPSEADWSIFVNE[IV]EAVAEGMPTEVSEVP[AV]WKAKCKN[MV]AALGREM[SC]I (SEQ ID NO: 646); an amino acid sequence MOTIF 2 having at least 90% sequence identity to the amino acid sequence as represented by the formula PQLQYRMYG[NS]LI[KN]QMAQVAQNYDQ[ED]FKQ[FL]KLFI[IA]QNQI[LF]GSYLLQQN[KR]A F (SEQ ID NO: 647); an amino acid sequence MOTIF 3 having at least 90% sequence identity to the amino acid sequence as represented by the formula NTFMQMTPFTRWRLRLSASASENA[EG]LAFPTATA[PL]DSTT[EQ][IV]VITFHVTAIR (SEQ ID NO: 648); an amino acid sequence MOTIF 4 having at least 90% sequence identity to the amino acid sequence as represented by the formula [DN]FTSRHVVK[GD]IPVSLLLDGEDWEFEIPVQ[AG]GMSSFP (SEQ ID NO: 649); an amino acid sequence MOTIF 5 having at least 90% sequence identity to the amino acid sequence as represented by the formula IIHQP[SA]T[RQ][ST]G[IT]VYILLQGSTIFHDRRR[DE]EVMTFQAA[DA]PLN[FY][QH]YAYRLDT G (SEQ ID NO: 650); an amino acid sequence MOTIF 6 having at least 90% sequence identity to the amino acid sequence as represented by the formula S[HQ]ADRLAAIQP[AV]DLTN[HY]LEMAT[HQ]MDMRTT[RS][MI]L[IL]GLLN[MI]LRIQNAALMY EY (SEQ ID NO: 651); an amino acid sequence MOTIF 7 having at least 90% sequence identity to the amino acid sequence as represented by the formula [VL]DRVEFSEVMVIHRMYVRL[SA]DL[ND]VGEL[PE]GA[EG][RK]VKR[VL]YV[FL]ADVVE (SEQ ID NO: 652); an amino acid sequence MOTIF 8 having at least 90% sequence identity to the amino acid sequence as represented by the formula A[DE]RELQMESFHSAVISQRRQEL[ND]TA[IF]AKM[DE]R[LM]SLQMEEE[NS]RAMEQAQKE M (SEQ ID NO: 653); an amino acid sequence MOTIF 9 having at least 90% sequence identity to the amino acid sequence as represented by the formula FVTAGATAPGA[AV]ASAGQAVSIAGQAAQ[AG]LRRVVEILE[GQ]LEAVMEVVAA[VI]K (SEQ ID NO: 654); an amino acid sequence MOTIF 10 having at least 90% sequence identity to the amino acid sequence as represented by the formula DGMNWG[IT]YI[YH]GE[KE]V[EQ]RSPLLPSNAILAVWADRC[TI]ITSARHNH[VF]NAPGR[IV]I (SEQ ID NO: 655); an amino acid sequence MOTIF 11 having at least 90% sequence identity to the amino acid sequence as represented by the formula [KV][VK][CA]RPPSPDM[MV]SAVAEHALWLNDVLLQVVQ[KN]ESQ[LM]QGT[AE]PYNECLAL LGR (SEQ ID NO: 656); an amino acid sequence MOTIF 12 having at least 90% sequence identity to the amino acid sequence as represented by the formula PTELT[VA]WPLGMDTV[AG]NLLIAQENAAL[VL]GLIQLGPSS (SEQ ID NO: 657); an amino acid sequence MOTIF 13 having at least 90% sequence identity to the amino acid sequence as represented by the formula RDQ[MT][HQ]MPGSVTVI[IV]LCRLLQFP[IT]DGSQA[TA]T (SEQ ID NO: 658); an amino acid sequence MOTIF 14 having at least 90% sequence identity to the amino acid sequence as represented by the formula TSIPVEVVTDP[SN]ILLGMQTTV[LH]IAEL (SEQ ID NO: 659); an amino acid sequence MOTIF 15 having at least 90% sequence identity to the amino acid sequence as represented by the formula EGLR[EQ]FQNRQVARA[VL]FAVLKAVA[MQ]I[AG] (SEQ ID NO: 660); an amino acid sequence MOTIF 16 having at least 90% sequence identity to the amino acid sequence as represented by the formula W[TS]RVRIRHLEM[QH]F[AV]QEASG (SEQ ID NO: 661); an amino acid sequence MOTIF 17 having at least 90% sequence identity to the amino acid sequence as represented by the formula QISELQY[ED]IWVQG[LM][ML]RDIA (SEQ ID NO: 662); an amino acid sequence MOTIF 18 having at least 90% sequence identity to the amino acid sequence as represented by the formula TFTLGSGVTGITSMHGEPSLDPWNGVSLDSASPTAF (SEQ ID NO: 663); an amino acid sequence MOTIF 19 having at least 90% sequence identity to the amino acid sequence as represented by the formula MDYSTLYRDLNQIS (SEQ ID NO: 664); an amino acid sequence MOTIF 20 having at least 90% sequence identity to the amino acid sequence as represented by the formula LRLPFM[QK]LHARVIEQN[VR]K[SE] (SEQ ID NO: 665); an amino acid sequence MOTIF 21 having at least 90% sequence identity to the amino acid sequence as represented by the formula VDSLEQVG[QH][IL]V[GD]AP (SEQ ID NO: 666); an amino acid sequence MOTIF 22 having at least 90% sequence identity to the amino acid sequence as represented by the formula [IV][EQ][CA]VMK[IM]GRF[VG][SL]VV (SEQ ID NO: 667); an amino acid sequence MOTIF 23 having at least 90% sequence identity to the amino acid sequence as represented by the formula TLTNEPSE[EQ]F (SEQ ID NO: 668); and an amino acid sequence MOTIF 24 having at least 90% sequence identity to the amino acid sequence as represented by the formula LPRQSRNISF (SEQ ID NO: 669).

[0174] In some embodiments a PtIP-83 polypeptide comprises an amino acid sequence MOTIF selected from: an amino acid sequence MOTIF 1 as represented by an amino acid sequence of the formula MP[DE]MP[ST][ED]ADWSIFVNE[IVL]EAVAEGMPTEVSEVP[AV]W[KR]AKCKN[MV]AALGRE M[SC]I (SEQ ID NO: 670); an amino acid sequence MOTIF 2 as represented by an amino acid sequence of the formula PQLQYRMYG[NS]LI[KRN]QMAQVAQNYD[QR][ED]FK[QR][FL][KR]LFI[IAVL]QNQI[LF]GSYL L[QE]QN[KR]AF (SEQ ID NO: 671); an amino acid sequence MOTIF 3 as represented by an amino acid sequence of the formula N[TK]FMQMTPFT[RH]WRLRLSASA[SPKA]EN[AK][EG]LAFPTATA[PL]DSTT[EQ][IV][VA]ITF HVTAIR (SEQ ID NO: 672); an amino acid sequence MOTIF 4 as represented by an amino acid sequence of the formula [DN]FTSRHVVK[GD]IPV[SN]LLLDG[EG]DWEFEIPVQ[AG]GMSSFP (SEQ ID NO: 673); an amino acid sequence MOTIF 5 as represented by an amino acid sequence of the formula IIHQP[SA]T[RQ][ST]G[IT][VI]YlLLQGST[IV]FHDRRR[DE][EQ]V[ML]T[FP]QAA[DAV]PLN[FY][QH]YAYRLDTG (SEQ ID NO: 674); an amino acid sequence MOTIF 6 as represented by an amino acid sequence of the formula S[HQ]ADRLAAIQP[AV][DN]LTN[HYF]LEMAT[HQ]MDMRTT[RS][MI]L[IL]GLLN[MI][LM]RIQN AAL[MR]YEY (SEQ ID NO: 675); an amino acid sequence MOTIF 7 as represented by an amino acid sequence of the formula [VL]D[RQ]VEFSEVMVIHRMYV[N]RL[SA]DL[ND]V[GA][EQ]L[PE]GA[EG][RK]VKR[VL]YV[FL]ADVVE (SEQ ID NO: 676); an amino acid sequence MOTIF 8 as represented by an amino acid sequence of the formula A[DE]RELQMESFH[SA]AVISQ[RK]R[QGE]EL[ND][TD][AT][IF]AKM[DE]R[LM]SLQMEEE[NS D][RG]AMEQA[QR]KEM (SEQ ID NO: 677); an amino acid sequence MOTIF 9 as represented by an amino acid sequence of the formula F[VL]TAGATAPGA[AV]ASAGQAV[SN]IAGQAAQ[AG]LRRVVEILE[GQ]LEAVMEVVAA[VI]K (SEQ ID NO: 678); an amino acid sequence MOTIF 10 as represented by an amino acid sequence of the formula D[GD][MA][NK]WG[IT]Y[IV][YH][GA]E[KE]V[EQ][RVL]SPL[LYF][PN][SNG][NW][ASP][IY]L[AG V]V[WE]A[DQ]R[CS][TI]IT[SA]A[RFM]HN[HVT][VF][ND][AER]PG[RW][IV][IR] (SEQ ID NO: 679); an amino acid sequence MOTIF 11 as represented by an amino acid sequence of the formula [KV][VK][CA][RGC][PHY]PSP[DE][MIL][MV]SAV[AG][EV]HA[LIN]WL[NS][DK]VLL[QR]VVQ[K N]ES[QH][LM]QGT[AE][PSA]YNECLALLGR (SEQ ID NO: 680); an amino acid sequence MOTIF 12 as represented by an amino acid sequence of the formula [PN]T[EQ]LT[VAT]WPL[GR]MDTV[AG][ND]LLI[AT][QH]E[NS]AAL[VLS]GL[ITMA]QLG[PQ][S P]S (SEQ ID NO: 681); an amino acid sequence MOTIF 13 as represented by an amino acid sequence of the formula [RLC][DLWK][QNPR][MTP][HQR][MIL]PGSVTVI[IV]LCRLLQFP[IT][DG]G[SR][QFR][AS][TAD ][TW] (SEQ ID NO: 682); an amino acid sequence MOTIF 14 as represented by an amino acid sequence of the formula [TA][SGV][IL]PV[ED]VVTDP[SN]IL[LM]GMQT[TS]V[LH]IAEL (SEQ ID NO: 683); an amino acid sequence MOTIF 15 as represented by an amino acid sequence of the formula EGLR[EQ]FQN[RE]QVA[RN]A[VL]FAVL[KS][AS]VA[MQ]I[AG] (SEQ ID NO: 684); an amino acid sequence MOTIF 16 as represented by an amino acid sequence of the formula W[TS]RVRIRHLEM[QH]F[AV][QK]E[AS][SM][GN] (SEQ ID NO: 685); an amino acid sequence MOTIF 17 as represented by an amino acid sequence of the formula Q[IM]S[EQ]LQY[ED]IWVQG[LM][ML]RD[IM]A (SEQ ID NO: 686); an amino acid sequence MOTIF 18 as represented by an amino acid sequence of the formula TFTLGSGVTGITSMHGEPSLDPWNGVSLDSASPTAF (SEQ ID NO: 663); an amino acid sequence MOTIF 19 as represented by an amino acid sequence of the formula [MLV]DY[SK][TSK]L[YF][RE]DLNQIS (SEQ ID NO: 687); an amino acid sequence MOTIF 20 as represented by an amino acid sequence of the formula L[RHQ]L[PT]FM[QK]LHA[RIT][VQL][IR]E[QER][NF][VR][KWS][SE] (SEQ ID NO: 688); an amino acid sequence MOTIF 21 as represented by an amino acid sequence of the formula V[DN][SA]L[ED]QV[GS][QH][IL]V[GD]AP (SEQ ID NO: 689); an amino acid sequence MOTIF 22 as represented by an amino acid sequence of the formula [IV][EQH][CAS][VA][MI]K[IM][GV][RP][FI][VG][SL]VV (SEQ ID NO: 690); an amino acid sequence MOTIF 23 as represented by an amino acid sequence of the formula TLTN[EQ]PSE[EQDH]F (SEQ ID NO: 691); and an amino acid sequence MOTIF 24 as represented by an amino acid sequence of the formula LP[RS]QS[RT]N[IV]SF (SEQ ID NO: 692).

[0175] In some embodiments a PtIP-83 polypeptide comprises an amino acid sequence MOTIF selected from: an amino acid sequence MOTIF 1 having at least 90% sequence identity to the amino acid sequence as represented by the formula MP[DE]MP[ST][ED]ADWSIFVNE[IVL]EAVAEGMPTEVSEVP[AV]W[KR]AKCKN[MV]AALGRE M[SC]I (SEQ ID NO: 670); an amino acid sequence MOTIF 2 having at least 90% sequence identity to the amino acid sequence as represented by the formula PQLQYRMYG[NS]LI[KRN]QMAQVAQNYD[QR][ED]FK[QR][FL][KR]LFI[IAVL]QNQI[LF]GSYL L[QE]QN[KR]AF (SEQ ID NO: 671); an amino acid sequence MOTIF 3 having at least 90% sequence identity to the amino acid sequence as represented by the formula N[TK]FMQMTPFT[RH]WRLRLSASA[SPKA]EN[AK][EG]LAFPTATA[PL]DSTT[EQ][IV][VA]ITF HVTAIR (SEQ ID NO: 672); an amino acid sequence MOTIF 4 having at least 90% sequence identity to the amino acid sequence as represented by the formula [DN]FTSRHVVK[GD]IPV[SN]LLLDG[EG]DWEFEIPVQ[AG]GMSSFP (SEQ ID NO: 673); an amino acid sequence MOTIF 5 having at least 90% sequence identity to the amino acid sequence as represented by the formula IIHQP[SA]T[RQ][ST]G[IT][VI]YlLLQGST[IV]FHDRRR[DE][EQ]V[ML]T[FP]QAA[DAV]PLN[FY][QH]YAYRLDTG (SEQ ID NO: 674); an amino acid sequence MOTIF 6 having at least 90% sequence identity to the amino acid sequence as represented by the formula S[HQ]ADRLAAIQP[AV][DN]LTN[HYF]LEMAT[HQ]MDMRTT[RS][MI]L[IL]GLLN[MI][LM]RIQN AAL[MR]YEY (SEQ ID NO: 675); an amino acid sequence MOTIF 7 having at least 90% sequence identity to the amino acid sequence as represented by the formula [VL]D[RQ]VEFSEVMVIHRMYV[N]RL[SA]DL[ND]V[GA][EQ]L[PE]GA[EG][RK]VKR[VL]YV[FL]ADVVE (SEQ ID NO: 676); an amino acid sequence MOTIF 8 having at least 90% sequence identity to the amino acid sequence as represented by the formula A[DE]RELQMESFH[SA]AVISQ[RK]R[QGE]EL[ND][TD][AT][IF]AKM[DE]R[LM]SLQMEEE[NS D][RG]AMEQA[QR]KEM (SEQ ID NO: 677); an amino acid sequence MOTIF 9 having at least 90% sequence identity to the amino acid sequence as represented by the formula F[VL]TAGATAPGA[AV]ASAGQAV[SN]IAGQAAQ[AG]LRRVVEILE[GQ]LEAVMEVVAA[VI]K (SEQ ID NO: 678); an amino acid sequence MOTIF 10 having at least 90% sequence identity to the amino acid sequence as represented by the formula D[GD][MA][NK]WG[IT]Y[IV][YH][GA]E[KE]V[EQ][RVL]SPL[LYF][PN][SNG][NW][ASP][IY]L[AG V]V[WE]A[DQ]R[CS][TI]IT[SA]A[RFM]HN[HVT][VF][ND][AER]PG[RW][IV][IR] (SEQ ID NO: 679); an amino acid sequence MOTIF 11 having at least 90% sequence identity to the amino acid sequence as represented by the formula [KV][VK][CA][RGC][PHY]PSP[DE][MIL][MV]SAV[AG][EV]HA[LIN]WL[NS][DK]VLL[QR]VVQ[K N]ES[QH][LM]QGT[AE][PSA]YNECLALLGR (SEQ ID NO: 680); an amino acid sequence MOTIF 12 having at least 90% sequence identity to the amino acid sequence as represented by the formula [PN]T[EQ]LT[VAT]WPL[GR]MDTV[AG][ND]LLI[AT][QH]E[NS]AAL[VLS]GL[ITMA]QLG[PQ][S P]S (SEQ ID NO: 681); an amino acid sequence MOTIF 13 having at least 90% sequence identity to the amino acid sequence as represented by the formula [RLC][DLWK][QNPR][MTP][HQR][MIL]PGSVTVI[IV]LCRLLQFP[IT][DG]G[SR][QFR][AS][TAD ][TW] (SEQ ID NO: 682); an amino acid sequence MOTIF 14 having at least 90% sequence identity to the amino acid sequence as represented by the formula [TA][SGV][IL]PV[ED]VVTDP[SN]IL[LM]GMQT[TS]V[LH]IAEL (SEQ ID NO: 683); an amino acid sequence MOTIF 15 having at least 90% sequence identity to the amino acid sequence as represented by the formula EGLR[EQ]FQN[RE]QVA[RN]A[VL]FAVL[KS][AS]VA[MQ]I[AG] (SEQ ID NO: 684); an amino acid sequence MOTIF 16 having at least 90% sequence identity to the amino acid sequence as represented by the formula W[TS]RVRIRHLEM[QH]F[AV][QK]E[AS][SM][GN] (SEQ ID NO: 685); an amino acid sequence MOTIF 17 having at least 90% sequence identity to the amino acid sequence as represented by the formula Q[IM]S[EQ]LQY[ED]IWVQG[LM][ML]RD[IM]A (SEQ ID NO: 686); an amino acid sequence MOTIF 18 having at least 90% sequence identity to the amino acid sequence as represented by the formula TFTLGSGVTGITSMHGEPSLDPWNGVSLDSASPTAF (SEQ ID NO: 663); an amino acid sequence MOTIF 19 having at least 90% sequence identity to the amino acid sequence as represented by the formula [MLV]DY[SK][TSK]L[YF][RE]DLNQIS (SEQ ID NO: 687); an amino acid sequence MOTIF 20 having at least 90% sequence identity to the amino acid sequence as represented by the formula L[RHQ]L[PT]FM[QK]LHA[RIT][VQL][IR]E[QER][NF][VR][KWS][SE] (SEQ ID NO: 688); an amino acid sequence MOTIF 21 having at least 90% sequence identity to the amino acid sequence as represented by the formula V[DN][SA]L[ED]QV[GS][QH][IL]V[GD]AP (SEQ ID NO: 689); an amino acid sequence MOTIF 22 having at least 90% sequence identity to the amino acid sequence as represented by the formula [IV][EQH][CAS][VA][MI]K[IM][GV][RP][FI][VG][SL]VV (SEQ ID NO: 690); an amino acid sequence MOTIF 23 having at least 90% sequence identity to the amino acid sequence as represented by the formula TLTN[EQ]PSE[EQDH]F (SEQ ID NO: 691); and an amino acid sequence MOTIF 24 having at least 90% sequence identity to the amino acid sequence as represented by the formula LP[RS]QS[RT]N[IV]SF (SEQ ID NO: 692).

[0176] In some embodiments a PtIP-83 polypeptide comprises an amino acid sequence MOTIF selected from: an amino acid sequence MOTIF 1 as represented by an amino acid sequence of the formula MP[DE]MP[ST][ED]ADWSIFVNE[IVL]EAVAEGMPTEVSEVP[AVIL]W[KR]AKCKN[MVIL]AAL GREM[SCT]I (SEQ ID NO: 693); an amino acid sequence MOTIF 2 as represented by an amino acid sequence of the formula PQLQYRMYG[NS]LI[KRNQ]QMAQVAQNYD[QRNK][ED]FK[QRNK][FL][KR]LFI[IAVL]QNQI[L FIV]GSYLL[QEND]QN[KR]AF (SEQ ID NO: 694); an amino acid sequence MOTIF 3 as represented by an amino acid sequence of the formula N[TKSR]FMQMTPFT[RHK]WRLRLSASA[SPKATR]EN[AKR][EG]LAFPTATA[PLIV]DSTT[EQ ND][IVL][VAIL]ITFHVTAIR (SEQ ID NO: 695); an amino acid sequence MOTIF 4 as represented by an amino acid sequence of the formula [DNQE]FTSRHVVK[GDE]IPV[SNTQ]LLLDG[EGD]DWEFEIPVQ[AG]GMSSFP (SEQ ID NO: 696); an amino acid sequence MOTIF 5 as represented by an amino acid sequence of the formula IIHQP[SAT]T[RQKN][ST]G[ITLVS][VIL]YILLQGST[IVL]FHDRRR[DE][EQDN]V[MLIV]T[FP]QA A[DAVEIL]PLN[FY][QHN]YAYRLDTG (SEQ ID NO: 697); an amino acid sequence MOTIF 6 as represented by an amino acid sequence of the formula S[HQN]ADRLAAIQP[AVIL][DN]LTN[HYF]LEMAT[HQN]MDMRTT[RSKT][MILV]L[ILV]GLLN[M ILV][LMIV]RIQNAAL[MRILVK]YEY (SEQ ID NO: 698); an amino acid sequence MOTIF 7 as represented by an amino acid sequence of the formula [VLI]D[RQKN]VEFSEVMVIHRMYV[N]RL[SAT]DL[NDQE]V[GA][EQND]L[PED]GA[EGD][RK]VKR[VLI]YV[FLIV]ADVVE (SEQ ID NO: 699); an amino acid sequence MOTIF 8 as represented by an amino acid sequence of the formula A[DE]RELQMESFH[SAT]AVISQ[RK]R[QGEND]EL[NDQE][TDSE][ATS][IFLV]AKM[DE]R[LMI V]SLQMEEE[NSDQET][RGK]AMEQA[QRNK]KEM (SEQ ID NO: 700); an amino acid sequence MOTIF 9 as represented by an amino acid sequence of the formula F[VLI]TAGATAPGA[AVIL]ASAGQAV[SNTQ]IAGQAAQ[AG]LRRVVEILE[GQN]LEAVMEVVA A[VIL]K (SEQ ID NO: 701); an amino acid sequence MOTIF 10 as represented by an amino acid sequence of the formula D[GDE][MA][NKQK]WG[ITLVS]Y[IVL][YH][GA]E[KERD]V[EQND][RVLKI]SPL[LYFIV][PNQ][S NGTQ][NWQ][ASPT][IYLV]L[AGVIL]V[WED]A[DQNE]R[CST][TISLV]IT[SAT]A[RFMK]HN[HV TILS][VFIL][NDQE][AERDK]PG[RWK][IVL][IRLVK] (SEQ ID NO: 702); an amino acid sequence MOTIF 11 as represented by an amino acid sequence of the formula [KVRIL][VKRIL][CA][RGCK][PHY]PSP[DE][MILV][MVIL]SAV[AG][EVDIL]HA[LINVQ]WL[NSQ T][DKER]VLL[QRNK]VVQ[KNRQ]ES[QHN][LMIV]QGT[AED][PSAT]YNECLALLGR (SEQ ID NO: 703); an amino acid sequence MOTIF 12 as represented by an amino acid sequence of the formula [PNQ]T[EQDN]LT[VATILS]WPL[GRK]MDTV[AG][NDQE]LLI[ATS][QHN]E[NSQT]AAL[VLSIT]GL[ITMALVS]QLG[PQN][SPT]S (SEQ ID NO: 704); an amino acid sequence MOTIF 13 as represented by an amino acid sequence of the formula [RLCKIV][DLWKEIVR][QNPRK][MTP][HQR][MILV]PGSVTVI[IVL]LCRLLQFP[ITLVS][DGE]G[SRTK][QFRNK][AST][TADES][TWS] (SEQ ID NO: 705); an amino acid sequence MOTIF 14 as represented by an amino acid sequence of the formula [TA][SGVTIL][ILV]PV[ED]VVTDP[SNTQ]IL[LMIV]GMQT[TS]V[LHIV]IAEL (SEQ ID NO: 706); an amino acid sequence MOTIF 15 as represented by an amino acid sequence of the formula EGLR[EQND]FQN[REKD]QVA[RNKQ]A[VLI]FAVL[KSRT][AST]VA[MQN]I[AG] (SEQ ID NO: 707); an amino acid sequence MOTIF 16 as represented by an amino acid sequence of the formula W[TS]RVRIRHLEM[QHN]F[AVIL][QKNR]E[AST][SMT][GNQ] (SEQ ID NO: 708); an amino acid sequence MOTIF 17 as represented by an amino acid sequence of the formula Q[IMLV]S[EQND]LQY[ED]IWVQG[LMIV][MLIV]RD[IMLV]A (SEQ ID NO: 709); an amino acid sequence MOTIF 18 as represented by an amino acid sequence of the formula TFTLGSGVTGITSMHGEPSLDPWNGVSLDSASPTAF (SEQ ID NO: 663); an amino acid sequence MOTIF 19 as represented by an amino acid sequence of the formula [MLVI]DY[SKTR][TSKR]L[YF][REKD]DLNQIS (SEQ ID NO: 710); an amino acid sequence MOTIF 20 as represented by an amino acid sequence of the formula L[RHQKN]L[PTS]FM[QKNR]LHA[RITKLVS][VQLIN][IRLVK]E[QERNDK][NFQ][VRILK][KWSR T][SETD] (SEQ ID NO: 711); an amino acid sequence MOTIF 21 as represented by an amino acid sequence of the formula V[DNQE][SAT]L[ED]QV[GST][QHN][ILV]V[GDE]AP (SEQ ID NO: 712); an amino acid sequence MOTIF 22 as represented by an amino acid sequence of the formula [IVL][EQHND][CAST][VAIL][MILV]K[IMLV][GVIL][RPK][FILV][VGIL][SLTIV]VV (SEQ ID NO: 713); an amino acid sequence MOTIF 23 as represented by an amino acid sequence of the formula TLTN[EQDN]PSE[EQDHN]F (SEQ ID NO: 714); and an amino acid sequence MOTIF 24 as represented by an amino acid sequence of the formula LP[RSKT]QS[RTKS]N[IVL]SF (SEQ ID NO: 715).

[0177] In some embodiments a PtIP-83 polypeptide comprises an amino acid sequence MOTIF selected from: an amino acid sequence MOTIF 1 having at least 90% sequence identity to the amino acid sequence as represented by the formula MP[DE]MP[ST][ED]ADWSIFVNE[IVL]EAVAEGMPTEVSEVP[AVIL]W[KR]AKCKN[MVIL]AAL GREM[SCT]I (SEQ ID NO: 693); an amino acid sequence MOTIF 2 having at least 90% sequence identity to the amino acid sequence as represented by the formula PQLQYRMYG[NS]LI[KRNQ]QMAQVAQNYD[QRNK][ED]FK[QRNK][FL][KR]LFI[IAVL]QNQI[L FIV]GSYLL[QEND]QN[KR]AF (SEQ ID NO: 694); an amino acid sequence MOTIF 3 having at least 90% sequence identity to the amino acid sequence as represented by the formula N[TKSR]FMQMTPFT[RHK]WRLRLSASA[SPKATR]EN[AKR][EG]LAFPTATA[PLIV]DSTT[EQ ND][IVL][VAIL]ITFHVTAIR (SEQ ID NO: 695); an amino acid sequence MOTIF 4 having at least 90% sequence identity to the amino acid sequence as represented by the formula [DNQE]FTSRHVVK[GDE]IPV[SNTQ]LLLDG[EGD]DWEFEIPVQ[AG]GMSSFP (SEQ ID NO: 696); an amino acid sequence MOTIF 5 having at least 90% sequence identity to the amino acid sequence as represented by the formula IIHQP[SAT]T[RQKN][ST]G[ITLVS][VIL]YILLQGST[IVL]FHDRRR[DE][EQDN]V[MLIV]T[FP]QA A[DAVEIL]PLN[FY][QHN]YAYRLDTG (SEQ ID NO: 697); an amino acid sequence MOTIF 6 having at least 90% sequence identity to the amino acid sequence as represented by the formula S[HQN]ADRLAAIQP[AVIL][DN]LTN[HYF]LEMAT[HQN]MDMRTT[RSKT][MILV]L[ILV]GLLN[M ILV][LMIV]RIQNAAL[MRILVK]YEY (SEQ ID NO: 698); an amino acid sequence MOTIF 7 having at least 90% sequence identity to the amino acid sequence as represented by the formula [VLI]D[RQKN]VEFSEVMVIHRMYV[N]RL[SAT]DL[NDQE]V[GA][EQND]L[PED]GA[EGD][RK]VKR[VLI]YV[FLIV]ADVVE (SEQ ID NO: 699); an amino acid sequence MOTIF 8 having at least 90% sequence identity to the amino acid sequence as represented by the formula A[DE]RELQMESFH[SAT]AVISQ[RK]R[QGEND]EL[NDQE][TDSE][ATS][IFLV]AKM[DE]R[LMI V]SLQMEEE[NSDQET][RGK]AMEQA[QRNK]KEM (SEQ ID NO: 700); an amino acid sequence MOTIF 9 having at least 90% sequence identity to the amino acid sequence as represented by the formula F[VLI]TAGATAPGA[AVIL]ASAGQAV[SNTQ]IAGQAAQ[AG]LRRVVEILE[GQN]LEAVMEVVA A[VIL]K (SEQ ID NO: 701); an amino acid sequence MOTIF 10 having at least 90% sequence identity to the amino acid sequence as represented by the formula D[GDE][MA][NKQK]WG[ITLVS]Y[IVL][YH][GA]E[KERD]V[EQND][RVLKI]SPL[LYFIV][PNQ][S NGTQ][NWQ][ASPT][IYLV]L[AGVIL]V[WED]A[DQNE]R[CST][TISLV]IT[SAT]A[RFMK]HN [HV TILS][VFIL][NDQE][AERDK]PG[RWK][IVL][IRLVK] (SEQ ID NO: 702); an amino acid sequence MOTIF 11 having at least 90% sequence identity to the amino acid sequence as represented by the formula [KVRIL][VKRIL][CA][RGCK][PHY]PSP[DE][MILV][MVIL]SAV[AG][EVDIL]HA[LINVQ]WL[NSQ T][DKER]VLL[QRNK]VVQ[KNRQ]ES[QHN][LMIV]QGT[AED][PSAT]YNECLALLGR (SEQ ID NO: 703); an amino acid sequence MOTIF 12 having at least 90% sequence identity to the amino acid sequence as represented by the formula [PNQ]T[EQDN]LT[VATILS]WPL[GRK]MDTV[AG][NDQE]LLI[ATS][QHN]E[NSQT]AAL[VLSIT]GL[ITMALVS]QLG[PQN][SPT]S (SEQ ID NO: 704); an amino acid sequence MOTIF 13 having at least 90% sequence identity to the amino acid sequence as represented by the formula [RLCKIV][DLWKEIVR][QNPRK][MTP][HQR][MILV]PGSVTVI[IVL]LCRLLQFP[ITLVS][DGE]G[SRTK][QFRNK][AST][TADES][TWS] (SEQ ID NO: 705); an amino acid sequence MOTIF 14 having at least 90% sequence identity to the amino acid sequence as represented by the formula [TA][SGVTIL][ILV]PV[ED]VVTDP[SNTQ]IL[LMIV]GMQT[TS]V[LHIV]IAEL (SEQ ID NO: 706); an amino acid sequence MOTIF 15 having at least 90% sequence identity to the amino acid sequence as represented by the formula EGLR[EQND]FQN[REKD]QVA[RNKQ]A[VLI]FAVL[KSRT][AST]VA[MQN]I[AG] (SEQ ID NO: 707); an amino acid sequence MOTIF 16 having at least 90% sequence identity to the amino acid sequence as represented by the formula W[TS]RVRIRHLEM[QHN]F[AVIL][QKNR]E[AST][SMT][GNQ] (SEQ ID NO: 708); an amino acid sequence MOTIF 17 having at least 90% sequence identity to the amino acid sequence as represented by the formula Q[IMLV]S[EQND]LQY[ED]IWVQG[LMIV][MLIV]RD[IMLV]A (SEQ ID NO: 709); an amino acid sequence MOTIF 18 having at least 90% sequence identity to the amino acid sequence as represented by the formula TFTLGSGVTGITSMHGEPSLDPWNGVSLDSASPTAF (SEQ ID NO: 663); an amino acid sequence MOTIF 19 having at least 90% sequence identity to the amino acid sequence as represented by the formula [MLVI]DY[SKTR][TSKR]L[YF][REKD]DLNQIS (SEQ ID NO: 710); an amino acid sequence MOTIF 20 having at least 90% sequence identity to the amino acid sequence as represented by the formula L[RHQKN]L[PTS]FM[QKNR]LHA[RITKLVS][VQLIN][IRLVK]E[QERNDK][NFQ][VRILK][KWSR T][SETD] (SEQ ID NO: 711); an amino acid sequence MOTIF 21 having at least 90% sequence identity to the amino acid sequence as represented by the formula V[DNQE][SAT]L[ED]QV[GST][QHN][ILV]V[GDE]AP (SEQ ID NO: 712); an amino acid sequence MOTIF 22 having at least 90% sequence identity to the amino acid sequence as represented by the formula [IVL][EQHND][CAST][VAIL][MILV]K[IMLV][GVIL][RPK][FILV][VGIL][SLTIV]VV (SEQ ID NO: 713); an amino acid sequence MOTIF 23 having at least 90% sequence identity to the amino acid sequence as represented by the formula TLTN[EQDN]PSE[EQDHN]F (SEQ ID NO: 714); and an amino acid sequence MOTIF 24 having at least 90% sequence identity to the amino acid sequence as represented by the formula LP[RSKT]QS[RTKS]N[IVL]SF (SEQ ID NO: 715).

[0178] In some embodiment a PtIP-83 polypeptide comprises, sequentially from the N-terminus to the C-terminus, an amino acid sequence MOTIF selected from: MOTIF 19 (SEQ ID NO: 664, SEQ ID NO: 687 or SEQ ID NO: 710), MOTIF 7 (SEQ ID NO: 652, SEQ ID NO: 676 or SEQ ID NO: 699), MOTIF 13 (SEQ ID NO: 658, SEQ ID NO: 682 or SEQ ID NO: 705), MOTIF 20 (SEQ ID NO: 665, SEQ ID NO: 688 or SEQ ID NO: 711), MOTIF 10 (SEQ ID NO: 655, SEQ ID NO: 679 or SEQ ID NO: 702), MOTIF 18 (SEQ ID NO: 663), MOTIF 24 (SEQ ID NO: 669, SEQ ID NO: 692 or SEQ ID NO: 715), MOTIF 14 (SEQ ID NO: 659, SEQ ID NO: 683 or SEQ ID NO: 706), MOTIF 11 (SEQ ID NO: 656, SEQ ID NO: 680 or SEQ ID NO: 703), MOTIF 22 (SEQ ID NO: 667, SEQ ID NO: 690 or SEQ ID NO: 713), MOTIF 2 (SEQ ID NO: 647, SEQ ID NO: 671 or SEQ ID NO: 694), MOTIF 8 (SEQ ID NO: 653, SEQ ID NO: 677 or SEQ ID NO: 700), MOTIF 15 (SEQ ID NO: 660, SEQ ID NO: 684 or SEQ ID NO: 707), MOTIF 9 (SEQ ID NO: 654, SEQ ID NO: 678 or SEQ ID NO: 701), MOTIF 21 (SEQ ID NO: 666, SEQ ID NO: 689 or SEQ ID NO: 712), MOTIF 1 (SEQ ID NO: 646, SEQ ID NO: 670 or SEQ ID NO: 693), MOTIF 17 (SEQ ID NO: 662, SEQ ID NO: 686 or SEQ ID NO: 709), MOTIF 6 (SEQ ID NO: 651, SEQ ID NO: 675 or SEQ ID NO: 698), MOTIF 12 (SEQ ID NO: 657, SEQ ID NO: 681 or SEQ ID NO: 704), MOTIF 4 (SEQ ID NO: 649, SEQ ID NO: 673 or SEQ ID NO: 696), MOTIF 16 (SEQ ID NO: 661, SEQ ID NO: 685 or SEQ ID NO: 708), MOTIF 5 (SEQ ID NO: 650, SEQ ID NO: 674 or SEQ ID NO: 697), MOTIF 23 (SEQ ID NO: 668, SEQ ID NO: 691 or SEQ ID NO: 714), and MOTIF 3 (SEQ ID NO: 648, SEQ ID NO: 672 or SEQ ID NO: 695).

[0179] In some embodiments a PtIP-83 polypeptide comprises, sequentially from the N-terminus to the C-terminus, an amino acid sequence MOTIF selected from: MOTIF 19 (SEQ ID NO: 664, SEQ ID NO: 687 or SEQ ID NO: 710), MOTIF 7 (SEQ ID NO: 652, SEQ ID NO: 676 or SEQ ID NO: 699), MOTIF 13 (SEQ ID NO: 658, SEQ ID NO: 682 or SEQ ID NO: 705), MOTIF 20 (SEQ ID NO: 665, SEQ ID NO: 688 or SEQ ID NO: 711), MOTIF 14 (SEQ ID NO: 659, SEQ ID NO: 683 or SEQ ID NO: 706), MOTIF 2 (SEQ ID NO: 647, SEQ ID NO: 671 or SEQ ID NO: 694), MOTIF 8 (SEQ ID NO: 653, SEQ ID NO: 677 or SEQ ID NO: 700), MOTIF 15 (SEQ ID NO: 660, SEQ ID NO: 684 or SEQ ID NO: 707), MOTIF 9 (SEQ ID NO: 654, SEQ ID NO: 678 or SEQ ID NO: 701), MOTIF 21 (SEQ ID NO: 666, SEQ ID NO: 689 or SEQ ID NO: 712), MOTIF 1 (SEQ ID NO: 646, SEQ ID NO: 670 or SEQ ID NO: 693), MOTIF 17 (SEQ ID NO: 662, SEQ ID NO: 686 or SEQ ID NO: 709), MOTIF 6 (SEQ ID NO: 651, SEQ ID NO: 675 or SEQ ID NO: 698), MOTIF 12 (SEQ ID NO: 657, SEQ ID NO: 681 or SEQ ID NO: 704), MOTIF 4 (SEQ ID NO: 649, SEQ ID NO: 673 or SEQ ID NO: 696), MOTIF 16 (SEQ ID NO: 661, SEQ ID NO: 685 or SEQ ID NO: 708), MOTIF 5 (SEQ ID NO: 650, SEQ ID NO: 674 or SEQ ID NO: 697), MOTIF 23 (SEQ ID NO: 668, SEQ ID NO: 691 or SEQ ID NO: 714), and MOTIF 3 (SEQ ID NO: 648, SEQ ID NO: 672 or SEQ ID NO: 695).

[0180] In some embodiments a PtIP-83 polypeptide comprises, sequentially from the N-terminus to the C-terminus, the amino acid sequence MOTIFs: MOTIF 19 (SEQ ID NO: 664, SEQ ID NO: 687 or SEQ ID NO: 710), MOTIF 7 (SEQ ID NO: 652, SEQ ID NO: 676 or SEQ ID NO: 699), MOTIF 13 (SEQ ID NO: 658, SEQ ID NO: 682 or SEQ ID NO: 705), MOTIF 20 (SEQ ID NO: 665, SEQ ID NO: 688 or SEQ ID NO: 711), MOTIF 10 (SEQ ID NO: 655, SEQ ID NO: 679 or SEQ ID NO: 702), MOTIF 18 (SEQ ID NO: 663), MOTIF 24 (SEQ ID NO: 669, SEQ ID NO: 692 or SEQ ID NO: 715), MOTIF 14 (SEQ ID NO: 659, SEQ ID NO: 683 or SEQ ID NO: 706), MOTIF 11 (SEQ ID NO: 656, SEQ ID NO: 680 or SEQ ID NO: 703), MOTIF 22 (SEQ ID NO: 667, SEQ ID NO: 690 or SEQ ID NO: 713), MOTIF 2 (SEQ ID NO: 647, SEQ ID NO: 671 or SEQ ID NO: 694), MOTIF 8 (SEQ ID NO: 653, SEQ ID NO: 677 or SEQ ID NO: 700), MOTIF 15 (SEQ ID NO: 660, SEQ ID NO: 684 or SEQ ID NO: 707), MOTIF 9 (SEQ ID NO: 654, SEQ ID NO: 678 or SEQ ID NO: 701), MOTIF 21 (SEQ ID NO: 666, SEQ ID NO: 689 or SEQ ID NO: 712), MOTIF 1 (SEQ ID NO: 646, SEQ ID NO: 670 or SEQ ID NO: 693), MOTIF 17 (SEQ ID NO: 662, SEQ ID NO: 686 or SEQ ID NO: 709), MOTIF 6 (SEQ ID NO: 651, SEQ ID NO: 675 or SEQ ID NO: 698), MOTIF 12 (SEQ ID NO: 657, SEQ ID NO: 681 or SEQ ID NO: 704), MOTIF 4 (SEQ ID NO: 649, SEQ ID NO: 673 or SEQ ID NO: 696), MOTIF 16 (SEQ ID NO: 661, SEQ ID NO: 685 or SEQ ID NO: 708), MOTIF 5 (SEQ ID NO: 650, SEQ ID NO: 674 or SEQ ID NO: 697), MOTIF 23 (SEQ ID NO: 668, SEQ ID NO: 691 or SEQ ID NO: 714), and MOTIF 3 (SEQ ID NO: 648, SEQ ID NO: 672 or SEQ ID NO: 695).

[0181] In some embodiments a PtIP-83 polypeptide comprises, sequentially from the N-terminus to the C-terminus, the amino acid sequence MOTIFs: MOTIF 19 (SEQ ID NO: 664, SEQ ID NO: 687 or SEQ ID NO: 710), MOTIF 7 (SEQ ID NO: 652, SEQ ID NO: 676 or SEQ ID NO: 699), MOTIF 13 (SEQ ID NO: 658, SEQ ID NO: 682 or SEQ ID NO: 705), MOTIF 20 (SEQ ID NO: 665, SEQ ID NO: 688 or SEQ ID NO: 711), MOTIF 14 (SEQ ID NO: 659, SEQ ID NO: 683 or SEQ ID NO: 706), MOTIF 2 (SEQ ID NO: 647, SEQ ID NO: 671 or SEQ ID NO: 694), MOTIF 8 (SEQ ID NO: 653, SEQ ID NO: 677 or SEQ ID NO: 700), MOTIF 15 (SEQ ID NO: 660, SEQ ID NO: 684 or SEQ ID NO: 707), MOTIF 9 (SEQ ID NO: 654, SEQ ID NO: 678 or SEQ ID NO: 701), MOTIF 21 (SEQ ID NO: 666, SEQ ID NO: 689 or SEQ ID NO: 712), MOTIF 1 (SEQ ID NO: 646, SEQ ID NO: 670 or SEQ ID NO: 693), MOTIF 17 (SEQ ID NO: 662, SEQ ID NO: 686 or SEQ ID NO: 709), MOTIF 6 (SEQ ID NO: 651, SEQ ID NO: 675 or SEQ ID NO: 698), MOTIF 12 (SEQ ID NO: 657, SEQ ID NO: 681 or SEQ ID NO: 704), MOTIF 4 (SEQ ID NO: 649, SEQ ID NO: 673 or SEQ ID NO: 696), MOTIF 16 (SEQ ID NO: 661, SEQ ID NO: 685 or SEQ ID NO: 708), MOTIF 5 (SEQ ID NO: 650, SEQ ID NO: 674 or SEQ ID NO: 697), MOTIF 23 (SEQ ID NO: 668, SEQ ID NO: 691 or SEQ ID NO: 714), and MOTIF 3 (SEQ ID NO: 648, SEQ ID NO: 672 or SEQ ID NO: 695).

[0182] In some embodiments a PtIP-83 polypeptide comprises, sequentially from the N-terminus to the C-terminus: a Region A of between about 200 to about 300 amino acids in length comprising an amino acid sequence MOTIF of: MOTIF 19 (SEQ ID NO: 664, SEQ ID NO: 687 or SEQ ID NO: 710), MOTIF 7 (SEQ ID NO: 652, SEQ ID NO: 676 or SEQ ID NO: 699), MOTIF 13 (SEQ ID NO: 658, SEQ ID NO: 682 or SEQ ID NO: 705), MOTIF 20 (SEQ ID NO: 665, SEQ ID NO: 688 or SEQ ID NO: 711), MOTIF 10 (SEQ ID NO: 655, SEQ ID NO: 679 or SEQ ID NO: 702), MOTIF 18 (SEQ ID NO: 663), MOTIF 24 (SEQ ID NO: 669, SEQ ID NO: 692 or SEQ ID NO: 715), and/or MOTIF 14 having a predominantly nonconserved secondary structure; a Region B of between about 380 to about 465 amino acids in length comprising an amino acid sequence MOTIF of MOTIF 22 (SEQ ID NO: 667, SEQ ID NO: 690 or SEQ ID NO: 713), MOTIF 2 (SEQ ID NO: 647, SEQ ID NO: 671 or SEQ ID NO: 694), MOTIF 8 (SEQ ID NO: 653, SEQ ID NO: 677 or SEQ ID NO: 700), MOTIF 15 (SEQ ID NO: 660, SEQ ID NO: 684 or SEQ ID NO: 707), MOTIF 9 (SEQ ID NO: 654, SEQ ID NO: 678 or SEQ ID NO: 701), MOTIF 21 (SEQ ID NO: 666, SEQ ID NO: 689 or SEQ ID NO: 712), MOTIF 1 (SEQ ID NO: 646, SEQ ID NO: 670 or SEQ ID NO: 693), MOTIF 17 (SEQ ID NO: 662, SEQ ID NO: 686 or SEQ ID NO: 709), MOTIF 6 (SEQ ID NO: 651, SEQ ID NO: 675 or SEQ ID NO: 698), and/or MOTIF 12 and having a predominately alpha helical structure; and a Region C of between about 150 to about 180 amino acids in length comprising an amino acid sequence MOTIF of MOTIF 16 (SEQ ID NO: 661, SEQ ID NO: 685 or SEQ ID NO: 708), MOTIF 5 (SEQ ID NO: 650, SEQ ID NO: 674 or SEQ ID NO: 697), MOTIF 23 (SEQ ID NO: 668, SEQ ID NO: 691 or SEQ ID NO: 714), and/or MOTIF 3 having a consensus secondary structure comprising predominately beta strand structure.

[0183] In some embodiments a PtIP-83 polypeptide comprises sequentially from the N-terminus to the C-terminus: a Region A of between about 200 to about 300 amino acids in length having predominantly a nonconserved secondary structure; a Region B of between about 380 to about 465 amino acids in length having a consensus secondary structure comprising 8 to 10 segments of predominately alpha helical structure; and a Region C of between about 150 to about 180 amino acids in length having a consensus secondary structure comprising 6 to 8 segments of predominately beta strand structure. As used herein “predominantly a nonconserved secondary structure” means that the regions of secondary structure don't consistently align within the family of PtIP polypeptides. As used herein “predominately alpha helical structure” means that secondary structure prediction may have one or more gap of between 1 to 4 amino acids of coil and/or beta strand structure intervening in the alpha helix structure. As used herein “predominately beta strand structure” means that secondary structure prediction may have a gap of between 1 to 4 amino acids of coil and/or alpha helix structure intervening in the beta strand structure. In some embodiments the secondary structure is generated by the PSIPRED, top ranked secondary structure prediction method (Jones DT. (1999) J. Mol. Biol. 292: 195-202).

[0184] In some embodiments a PtIP-83 polypeptide comprises sequentially from the N-terminus to the C-terminus: a Region A of between about 200 to about 300 amino acids in length having a predominantly nonconserved secondary structure; a Region B of between about 380 to about 465 amino acids in length having a consensus secondary structure comprising nine segments of predominately alpha helical structure; and a Region C of between about 150 to about 180 amino acids in length having a consensus secondary structure comprising seven segments of predominately beta strand structure.

[0185] In some embodiments a PtIP-83 polypeptide comprises sequentially from the N-terminus to the C-terminus: a Region A of between about 200 to about 300 amino acids in length having a flexible consensus secondary structure, wherein the Region A comprises a conserved beta strand 1 (β1a) of between about 4 and about 12 amino acids in length within about amino acid residue 30 to about amino acid residue 130 from the N-terminus of the PtIP-83 polypeptide; a Region B of between about 380 to about 465 amino acids in length having a consensus secondary structure comprising nine segments of predominately alpha helical structure; and a Region C of between about 150 to about 180 amino acids in length having a consensus secondary structure comprising seven segments of predominately beta strand structure. As used herein, the term “about” when used in the context of the lower/upper limit of the length of a secondary structural element means the greater of −/+ an integer of up to −/+20% of the length of the secondary structural element or −/+1 amino acid. By means of example, a secondary structure element of between about 3 amino acids and about 23 amino acids in length means a secondary structure element of between 2 and 27 amino acids in length.

[0186] In some embodiments a PtIP-83 polypeptide comprises sequentially from the N-terminus to the C-terminus: a Region A of between about 200 to about 300 amino acids in length having a flexible consensus secondary structure, wherein the Region A comprises a conserved beta strand 1 (β1a) of between about 4 and about 12 amino acids in length, a coil of between about 10 and and about 20 amino acids in length and a beta strand 2 (β1b) of between about 4 and about 12 amino acids in length, within about amino acid residue 30 to about amino acid residue 165 from the N-terminus of the PtIP-83 polypeptide; a Region B of between about 380 to about 465 amino acids in length having a consensus secondary structure comprising nine segments of predominately alpha helical structure; and a Region C of between about 150 to about 180 amino acids in length having a consensus secondary structure comprising seven segments of predominately beta strand structure.

[0187] In some embodiments a PtIP-83 polypeptide comprises sequentially from the N-terminus to the C-terminus: a Region A of between about 200 to about 300 amino acids in length having a predominantly nonconserved secondary structure; a Region B of between about 380 to about 465 amino acids in length having a consensus secondary structure comprising sequentially: i) an alpha helix-1 of between about 10 and about 26 amino acids in length; ii) a coil-1 of between about 2 and about 8 amino acids in length flanked by alpha helix-1 and alpha helix-2; iii) an alpha helix-2 of between about 15 and about 24 amino acids in length; iv) a coil-2 of between about 4 and about 14 amino acids in length flanked by alpha helix-2 and alpha helix-3; v) an alpha helix 3 of between about 15 and about 27 amino acids in length; vi) a coil-3 of between about 11 and about 13 amino acids in length flanked by alpha helix-3 and alpha helix-4; vii) an alpha helix-4 of about 180 amino acids in length; viii) a coil-4 of between about 4 and about 5 amino acids in length flanked by alpha helix-4 and alpha helix-5; ix) an alpha helix-5 of between about 50 and about 54 amino acids in length; x) a coil-5 of between about 11 and about 17 amino acids in length flanked by alpha helix-5 and alpha helix-6; xi) an alpha helix-6 of between about 15 and about 16 amino acids in length; xii) a coil-6 of between about 6 and about 9 amino acids in length flanked by alpha helix-6 and alpha helix-7; xiii) an alpha helix-7 of between about 49 and about 55 amino acids in length; xiv) a coil-7 of between about 3 and about 8 amino acids in length flanked by alpha helix-7 and alpha helix-8; xv) an alpha helix-8 of between about 33 and about 36 amino acids in length; xvi) a coil-8 of between about 14 and about 16 amino acids in length flanked by alpha helix-8 and alpha helix-9; xvii) an alpha helix-9 of between about 16 and about 23 amino acids in length; xviii) a coil-9 of between about 21 and about 28 amino acids in length flanked by alpha helix-9 and Region C; and a Region C of between about 150 to about 180 amino acids in length having a consensus secondary structure comprising seven segments of predominately beta strand structure.

[0188] In some embodiments a PtIP-83 polypeptide comprises sequentially from the N-terminus to the C-terminus: a Region A of between about 200 to about 300 amino acids in length having a predominantly nonconserved secondary structure; a Region B of between about 380 to about 465 amino acids in length having a consensus secondary structure comprising nine segments of predominately alpha helical structure; and a Region C of between about 150 to about 180 amino acids in length having a consensus secondary structure comprising sequentially: i) a beta strand-1 (β1) of between about 3 amino acids and about 5 amino acids in length; ii) a coil of between about 13 amino acids and about 17 amino acids in length; iii) a beta strand-2 (β2) of between about 7 amino acids and about 11 amino acids in length; iv) a coil of between about 17 amino acids and about 23 amino acids in length; v) a beta strand-3 (β3) of between about 5 amino acids and about 7 amino acids in length; vi) a coil of between about 12 amino acids and about 14 amino acids in length; vii) a beta strand-4 (β4) of between about 5 amino acids and about 6 amino acids in length; viii) a coil of between about 2 amino acids and about 7 amino acids in length; ix) a beta strand-5 (β5) of between about 5 amino acids and about 7 amino acids in length; x) a coil of between about 26 amino acids and about 28 amino acids in length; xi) a beta strand-6 (β6) of between about 5 amino acids and about 7 amino acids in length; xii) a coil of between about 16 amino acids and about 20 amino acids in length; and xiii) a beta strand-1 (β7) of between about 13 amino acids and about 17 amino acids in length.

[0189] In some embodiments a PtIP-83 polypeptide comprises sequentially from the N-terminus to the C-terminus: a Region A of between about 200 to about 300 amino acids in length having a predominantly nonconserved secondary structure; a Region B of between about 380 to about 465 amino acids in length having a consensus secondary structure comprising sequentially: i) an alpha helix-1 of between about 10 and about 26 amino acids in length; ii) a coil-1 of between about 2 and about 8 amino acids in length flanked by alpha helix-1 and alpha helix-2; iii) an alpha helix-2 of between about 15 and about 24 amino acids in length; iv) a coil-2 of between about 4 and about 14 amino acids in length flanked by alpha helix-2 and alpha helix-3; v) an alpha helix 3 of between about 15 and about 27 amino acids in length; vi) a coil-3 of between about 11 and about 13 amino acids in length flanked by alpha helix-3 and alpha helix-4; vii) an alpha helix-4 of about 24 180 amino acids in length; viii) a coil-4 of between about 4 and about 5 amino acids in length flanked by alpha helix-4 and alpha helix-5; ix) an alpha helix-5 of between about 50 and about 54 amino acids in length; x) a coil-5 of between about 11 and about 17 amino acids in length flanked by alpha helix-5 and alpha helix-6; xi) an alpha helix-6 of between about 15 and about 16 amino acids in length; xii) a coil-6 of between about 6 and about 9 amino acids in length flanked by alpha helix-6 and alpha helix-7; xiii) an alpha helix-7 of between about 49 and about 55 amino acids in length; xiv) a coil-7 of between about 3 and about 8 amino acids in length flanked by alpha helix-7 and alpha helix-8; xv) an alpha helix-8 of between about 33 and about 36 amino acids in length; xvi) a coil-8 of between about 14 and about 16 amino acids in length flanked by alpha helix-8 and alpha helix-9; xvii) an alpha helix-9 of between about 16 and about 23 amino acids in length; xviii) a coil-9 of between about 21 and about 28 amino acids in length flanked by alpha helix-9 and Region C; and a Region C of between about 150 to about 180 amino acids in length having a consensus secondary structure comprising sequentially: i) a beta strand-1 (β1) of between about 3 amino acids and about 5 amino acids in length; ii) a coil of between about 13 amino acids and about 17 amino acids in length; iii) a beta strand-2 (β2) of between about 7 amino acids and about 11 amino acids in length; iv) a coil of between about 17 amino acids and about 23 amino acids in length; v) a beta strand-3 (β3) of between about 5 amino acids and about 7 amino acids in length; vi) a coil of between about 12 amino acids and about 14 amino acids in length; vii) a beta strand-4 (β4) of between about 5 amino acids and about 6 amino acids in length; viii) a coil of between about 2 amino acids and about 7 amino acids in length; ix) a beta strand-5 (β5) of between about 5 amino acids and about 7 amino acids in length; x) a coil of between about 26 amino acids and about 28 amino acids in length; xi) a beta strand-6 (β6) of between about 5 amino acids and about 7 amino acids in length; xii) a coil of between about 16 amino acids and about 20 amino acids in length; and xiii) a beta strand-1 (β7) of between about 13 amino acids and about 17 amino acids in length.

[0190] In some embodiments a PtIP-83 polypeptide comprises sequentially from the N-terminus to the C-terminus: a Region A of between about 200 to about 300 amino acids in length having a flexible consensus secondary structure, wherein the Region A comprises a conserved beta strand 1 (β1a) of between about 4 and about 12 amino acids in length within about amino acid residue 30 to about amino acid residue 130 from the N-terminus of the PtIP-83 polypeptide; a Region B of between about 380 to about 465 amino acids in length having a consensus secondary structure comprising sequentially: i) an alpha helix-1 of between about 10 and about 26 amino acids in length; ii) a coil-1 of between about 2 and about 8 amino acids in length flanked by alpha helix-1 and alpha helix-2; iii) an alpha helix-2 of between about 15 and about 24 amino acids in length; iv) a coil-2 of between about 4 and about 14 amino acids in length flanked by alpha helix-2 and alpha helix-3; v) an alpha helix 3 of between about 15 and about 27 amino acids in length; vi) a coil-3 of between about 11 and about 13 amino acids in length flanked by alpha helix-3 and alpha helix-4; vii) an alpha helix-4 of about 24 180 amino acids in length; viii) a coil-4 of between about 4 and about 5 amino acids in length flanked by alpha helix-4 and alpha helix-5; ix) an alpha helix-5 of between about 50 and about 54 amino acids in length; x) a coil-5 of between about 11 and about 17 amino acids in length flanked by alpha helix-5 and alpha helix-6; xi) an alpha helix-6 of between about 15 and about 16 amino acids in length; xii) a coil-6 of between about 6 and about 9 amino acids in length flanked by alpha helix-6 and alpha helix-7; xiii) an alpha helix-7 of between about 49 and about 55 amino acids in length; xiv) a coil-7 of between about 3 and about 8 amino acids in length flanked by alpha helix-7 and alpha helix-8; xv) an alpha helix-8 of between about 33 and about 36 amino acids in length; xvi) a coil-8 of between about 14 and about 16 amino acids in length flanked by alpha helix-8 and alpha helix-9; xvii) an alpha helix-9 of between about 16 and about 23 amino acids in length; xviii) a coil-9 of between about 21 and about 28 amino acids in length flanked by alpha helix-9 and Region C; and a Region C of between about 150 to about 180 amino acids in length having a consensus secondary structure comprising sequentially: i) a beta strand-1 (β1) of between about 3 amino acids and about 5 amino acids in length; ii) a coil of between about 13 amino acids and about 17 amino acids in length; iii) a beta strand-2 (β2) of between about 7 amino acids and about 11 amino acids in length; iv) a coil of between about 17 amino acids and about 23 amino acids in length; v) a beta strand-3 (β3) of between about 5 amino acids and about 7 amino acids in length; vi) a coil of between about 12 amino acids and about 14 amino acids in length; vii) a beta strand-4 (β4) of between about 5 amino acids and about 6 amino acids in length; viii) a coil of between about 2 amino acids and about 7 amino acids in length; ix) a beta strand-5 (β5) of between about 5 amino acids and about 7 amino acids in length; x) a coil of between about 26 amino acids and about 28 amino acids in length; xi) a beta strand-6 (β6) of between about 5 amino acids and about 7 amino acids in length; xii) a coil of between about 16 amino acids and about 20 amino acids in length; and xiii) a beta strand-1 (β7) of between about 13 amino acids and about 17 amino acids in length.

[0191] In some embodiments a PtIP-83 polypeptide has a calculated molecular weight of between about 70 kD and about 120 kD, between about 75 kD and about 110 kD, and between about 80 kD and about 105 kD, and between about 85 kD and about 105 kD.

[0192] In some embodiments the PtIP-83 polypeptide has a modified physical property. As used herein, the term “physical property” refers to any parameter suitable for describing the physical-chemical characteristics of a protein. As used herein, “physical property of interest” and “property of interest” are used interchangeably to refer to physical properties of proteins that are being investigated and/or modified. Examples of physical properties include, but are not limited to net surface charge and charge distribution on the protein surface, net hydrophobicity and hydrophobic residue distribution on the protein surface, surface charge density, surface hydrophobicity density, total count of surface ionizable groups, surface tension, protein size and its distribution in solution, melting temperature, heat capacity, and second virial coefficient. Examples of physical properties also include, but are not limited to solubility, folding, stability, and digestibility. In some embodiments the PtIP-83 polypeptide has increased digestibility of proteolytic fragments in an insect gut. Models for digestion by simulated simulated gastric fluids are known to one skilled in the art (Fuchs, R. L. and J. D. Astwood. Food Technology 50: 83-88, 1996; Astwood, J. D., et al Nature Biotechnology 14: 1269-1273, 1996; Fu T J et al J. Agric Food Chem. 50: 7154-7160, 2002).

[0193] In some embodiments variants include polypeptides that differ in amino acid sequence due to mutagenesis. Variant proteins encompassed by the disclosure are biologically active, that is they continue to possess the desired biological activity (i.e. pesticidal activity) of the native protein. In some embodiment the variant will have at least about 10%, at least about 30%, at least about 50%, at least about 70%, at least about 80% or more of the insecticidal activity of the native protein. In some embodiments, the variants may have improved activity over the native protein.

[0194] Bacterial genes quite often possess multiple methionine initiation codons in proximity to the start of the open reading frame. Often, translation initiation at one or more of these start codons will lead to generation of a functional protein. These start codons can include ATG codons. However, bacteria such as Bacillus sp. also recognize the codon GTG as a start codon, and proteins that initiate translation at GTG codons contain a methionine at the first amino acid. On rare occasions, translation in bacterial systems can initiate at a TTG codon, though in this event the TTG encodes a methionine. Furthermore, it is not often determined a priori which of these codons are used naturally in the bacterium. Thus, it is understood that use of one of the alternate methionine codons may also lead to generation of pesticidal proteins. These pesticidal proteins are encompassed in the present disclosure and may be used in the methods of the present disclosure. It will be understood that, when expressed in plants, it will be necessary to alter the alternate start codon to ATG for proper translation.

[0195] In another aspect the PtIP-83 polypeptide may be expressed as a precursor protein with an intervening sequence that catalyzes multi-step, post translational protein splicing. Protein splicing involves the excision of an intervening sequence from a polypeptide with the concomitant joining of the flanking sequences to yield a new polypeptide (Chong, et al., (1996) J. Biol. Chem., 271:22159-22168). This intervening sequence or protein splicing element, referred to as inteins, which catalyze their own excision through three coordinated reactions at the N-terminal and C-terminal splice junctions: an acyl rearrangement of the N-terminal cysteine or serine; a transesterfication reaction between the two termini to form a branched ester or thioester intermediate and peptide bond cleavage coupled to cyclization of the intein C-terminal asparagine to free the intein (Evans, et al., (2000) J. Biol. Chem., 275:9091-9094. The elucidation of the mechanism of protein splicing has led to a number of intein-based applications (Comb, et al., U.S. Pat. No. 5,496,714; Comb, et al., U.S. Pat. No. 5,834,247; Camarero and Muir, (1999) J. Amer. Chem. Soc. 121:5597-5598; Chong, et al., (1997) Gene 192:271-281, Chong, et al., (1998) Nucleic Acids Res. 26:5109-5115; Chong, et al., (1998) J. Biol. Chem. 273:10567-10577; Cotton, et al., (1999) J. Am. Chem. Soc. 121:1100-1101; Evans, et al., (1999) J. Biol. Chem. 274:18359-18363; Evans, et al., (1999) J. Biol. Chem. 274:3923-3926; Evans, et al., (1998) Protein Sci. 7:2256-2264; Evans, et al., (2000) J. Biol. Chem. 275:9091-9094; Iwai and Pluckthun, (1999) FEBS Lett. 459:166-172; Mathys, et al., (1999) Gene 231:1-13; Mills, et al., (1998) Proc. Natl. Acad. Sci. USA 95:3543-3548; Muir, et al., (1998) Proc. Natl. Acad. Sci. USA 95:6705-6710; Otomo, et al., (1999) Biochemistry 38:16040-16044; Otomo, et al., (1999) J. Biolmol. NMR 14:105-114; Scott, et al., (1999) Proc. Natl. Acad. Sci. USA 96:13638-13643; Severinov and Muir, (1998) J. Biol. Chem. 273:16205-16209; Shingledecker, et al., (1998) Gene 207:187-195; Southworth, et al., (1998) EMBO J. 17:918-926; Southworth, et al., (1999) Biotechniques 27:110-120; Wood, et al., (1999) Nat. Biotechnol. 17:889-892; Wu, et al., (1998a) Proc. Natl. Acad. Sci. USA 95:9226-9231; Wu, et al., (1998b) Biochim Biophys Acta 1387:422-432; Xu, et al., (1999) Proc. Natl. Acad. Sci. USA 96:388-393; Yamazaki, et al., (1998) J. Am. Chem. Soc., 120:5591-5592). For the application of inteins in plant transgenes, see, Yang, et al., (Transgene Res 15:583-593 (2006)) and Evans, et al., (Annu. Rev. Plant Biol. 56:375-392 (2005)).

[0196] In another aspect the PtIP-83 polypeptide may be encoded by two separate genes where the intein of the precursor protein comes from the two genes, referred to as a split-intein, and the two portions of the precursor are joined by a peptide bond formation. This peptide bond formation is accomplished by intein-mediated trans-splicing. For this purpose, a first and a second expression cassette comprising the two separate genes further code for inteins capable of mediating protein trans-splicing. By trans-splicing, the proteins and polypeptides encoded by the first and second fragments may be linked by peptide bond formation. Trans-splicing inteins may be selected from the nucleolar and organellar genomes of different organisms including eukaryotes, archaebacteria and eubacteria. Inteins that may be used for are listed at neb.com/neb/inteins.html, which can be accessed on the world-wide web using the “www” prefix). The nucleotide sequence coding for an intein may be split into a 5′ and a 3′ part that code for the 5′ and the 3′ part of the intein, respectively. Sequence portions not necessary for intein splicing (e.g. homing endonuclease domain) may be deleted. The intein coding sequence is split such that the 5′ and the 3′ parts are capable of trans-splicing. For selecting a suitable splitting site of the intein coding sequence, the considerations published by Southworth, et al., (1998) EMBO J. 17:918-926 may be followed. In constructing the first and the second expression cassette, the 5′ intein coding sequence is linked to the 3′ end of the first fragment coding for the N-terminal part of the PtIP-83 polypeptide and the 3′ intein coding sequence is linked to the 5′ end of the second fragment coding for the C-terminal part of the PtIP-83 polypeptide.

[0197] In general, the trans-splicing partners can be designed using any split intein, including any naturally-occurring or artificially-split split intein. Several naturally-occurring split inteins are known, for example: the split intein of the DnaE gene of Synechocystis sp. PCC6803 (see, Wu, et al., (1998) Proc Natl Acad Sci USA. 95(16):9226-31 and Evans, et al., (2000) J Biol Chem. 275(13):9091-4 and of the DnaE gene from Nostoc punctiforme (see, Iwai, et al., (2006) FEBS Lett. 580(7):1853-8). Non-split inteins have been artificially split in the laboratory to create new split inteins, for example: the artificially split Ssp DnaB intein (see, Wu, et al., (1998) Biochim Biophys Acta. 1387:422-32) and split Sce VMA intein (see, Brenzel, et al., (2006) Biochemistry. 45(6):1571-8) and an artificially split fungal mini-intein (see, Elleuche, et al., (2007) Biochem Biophys Res Commun. 355(3):830-4). There are also intein databases available that catalogue known inteins (see for example the online-database available at: bioinformatics.weizmann.ac.ilrpietro/inteins/Inteinstable.html, which can be accessed on the world-wide web using the “www” prefix).

[0198] Naturally-occurring non-split inteins may have endonuclease or other enzymatic activities that can typically be removed when designing an artificially-split split intein. Such mini-inteins or minimized split inteins are well known in the art and are typically less than 200 amino acid residues long (see, Wu, et al., (1998) Biochim Biophys Acta. 1387:422-32). Suitable split inteins may have other purification enabling polypeptide elements added to their structure, provided that such elements do not inhibit the splicing of the split intein or are added in a manner that allows them to be removed prior to splicing. Protein splicing has been reported using proteins that comprise bacterial intein-like (BIL) domains (see, Amitai, et al., (2003) Mol Microbiol. 47:61-73) and hedgehog (Hog) auto-processing domains (the latter is combined with inteins when referred to as the Hog/intein superfamily or HINT family (see, Dassa, et al., (2004) J Biol Chem. 279:32001-7) and domains such as these may also be used to prepare artificially-split inteins. In particular, non-splicing members of such families may be modified by molecular biology methodologies to introduce or restore splicing activity in such related species. Recent studies demonstrate that splicing can be observed when a N-terminal split intein component is allowed to react with a C-terminal split intein component not found in nature to be its “partner”; for example, splicing has been observed utilizing partners that have as little as 30 to 50% homology with the “natural” splicing partner (see, Dassa, et al., (2007) Biochemistry. 46(1):322-30). Other such mixtures of disparate split intein partners have been shown to be unreactive one with another (see, Brenzel, et al., (2006) Biochemistry. 45(6):1571-8). However, it is within the ability of a person skilled in the relevant art to determine whether a particular pair of polypeptides is able to associate with each other to provide a functional intein, using routine methods and without the exercise of inventive skill.

[0199] In another aspect the PtIP-83 polypeptide is a circular permuted variant. In certain embodiments the PtIP-83 polypeptide is a circular permuted variant of the polypeptide of SEQ ID NO: 1, SEQ ID NO: 3, SEQ ID NO: 5, SEQ ID NO: 7, SEQ ID NO: 9, SEQ ID NO: 11, SEQ ID NO: 13, SEQ ID NO: 15, SEQ ID NO: 17, SEQ ID NO: 19, SEQ ID NO: 21, SEQ ID NO: 23, SEQ ID NO: 716, SEQ ID NO: 754, SEQ ID NO: 755, SEQ ID NO: 756, SEQ ID NO: 757, SEQ ID NO: 758, SEQ ID NO: 759, SEQ ID NO: 760, SEQ ID NO: 761, SEQ ID NO: 762, SEQ ID NO: 763, SEQ ID NO: 764, SEQ ID NO: 765, SEQ ID NO: 766, SEQ ID NO: 767, SEQ ID NO: 768, SEQ ID NO: 769, or SEQ ID NOs: 958-1026.

[0200] The development of recombinant DNA methods has made it possible to study the effects of sequence transposition on protein folding, structure and function. The approach used in creating new sequences resembles that of naturally occurring pairs of proteins that are related by linear reorganization of their amino acid sequences (Cunningham, et al., (1979) Proc. Natl. Acad. Sci. U.S.A. 76:3218-3222; Teather and Erfle, (1990) J. Bacteriol. 172:3837-3841; Schimming, et al., (1992) Eur. J. Biochem. 204:13-19; Yamiuchi and Minamikawa, (1991) FEBS Lett. 260:127-130; MacGregor, et al., (1996) FEBS Lett. 378:263-266). The first in vitro application of this type of rearrangement to proteins was described by Goldenberg and Creighton (J. Mol. Biol. 165:407-413, 1983). In creating a circular permuted variant a new N-terminus is selected at an internal site (breakpoint) of the original sequence, the new sequence having the same order of amino acids as the original from the breakpoint until it reaches an amino acid that is at or near the original C-terminus. At this point the new sequence is joined, either directly or through an additional portion of sequence (linker), to an amino acid that is at or near the original N-terminus and the new sequence continues with the same sequence as the original until it reaches a point that is at or near the amino acid that was N-terminal to the breakpoint site of the original sequence, this residue forming the new C-terminus of the chain. The length of the amino acid sequence of the linker can be selected empirically or with guidance from structural information or by using a combination of the two approaches. When no structural information is available, a small series of linkers can be prepared for testing using a design whose length is varied in order to span a range from 0 to 50 Å and whose sequence is chosen in order to be consistent with surface exposure (hydrophilicity, Hopp and Woods, (1983) Mol. Immunol. 20:483-489; Kyte and Doolittle, (1982) J. Mol. Biol. 157:105-132; solvent exposed surface area, Lee and Richards, (1971) J. Mol. Biol. 55:379-400) and the ability to adopt the necessary conformation without deranging the configuration of the pesticidal polypeptide (conformationally flexible; Karplus and Schulz, (1985) Naturwissenschaften 72:212-213). Assuming an average of translation of 2.0 to 3.8 Å per residue, this would mean the length to test would be between 0 to 30 residues, with 0 to 15 residues being the preferred range. Exemplary of such an empirical series would be to construct linkers using a cassette sequence such as Gly-Gly-Gly-Ser repeated n times, where n is 1, 2, 3 or 4. Those skilled in the art will recognize that there are many such sequences that vary in length or composition that can serve as linkers with the primary consideration being that they be neither excessively long nor short (cf., Sandhu, (1992) Critical Rev. Biotech. 12:437-462); if they are too long, entropy effects will likely destabilize the three-dimensional fold, and may also make folding kinetically impractical, and if they are too short, they will likely destabilize the molecule because of torsional or steric strain. Those skilled in the analysis of protein structural information will recognize that using the distance between the chain ends, defined as the distance between the c-alpha carbons, can be used to define the length of the sequence to be used or at least to limit the number of possibilities that must be tested in an empirical selection of linkers. They will also recognize that it is sometimes the case that the positions of the ends of the polypeptide chain are ill-defined in structural models derived from x-ray diffraction or nuclear magnetic resonance spectroscopy data, and that when true, this situation will therefore need to be taken into account in order to properly estimate the length of the linker required. From those residues whose positions are well defined are selected two residues that are close in sequence to the chain ends, and the distance between their c-alpha carbons is used to calculate an approximate length for a linker between them. Using the calculated length as a guide, linkers with a range of number of residues (calculated using 2 to 3.8 Å per residue) are then selected. These linkers may be composed of the original sequence, shortened or lengthened as necessary, and when lengthened the additional residues may be chosen to be flexible and hydrophilic as described above; or optionally the original sequence may be substituted for using a series of linkers, one example being the Gly-Gly-Gly-Ser cassette approach mentioned above; or optionally a combination of the original sequence and new sequence having the appropriate total length may be used. Sequences of pesticidal polypeptides capable of folding to biologically active states can be prepared by appropriate selection of the beginning (amino terminus) and ending (carboxyl terminus) positions from within the original polypeptide chain while using the linker sequence as described above. Amino and carboxyl termini are selected from within a common stretch of sequence, referred to as a breakpoint region, using the guidelines described below. A novel amino acid sequence is thus generated by selecting amino and carboxyl termini from within the same breakpoint region. In many cases the selection of the new termini will be such that the original position of the carboxyl terminus immediately preceded that of the amino terminus. However, those skilled in the art will recognize that selections of termini anywhere within the region may function, and that these will effectively lead to either deletions or additions to the amino or carboxyl portions of the new sequence. It is a central tenet of molecular biology that the primary amino acid sequence of a protein dictates folding to the three-dimensional structure necessary for expression of its biological function. Methods are known to those skilled in the art to obtain and interpret three-dimensional structural information using x-ray diffraction of single protein Crystals or nuclear magnetic resonance spectroscopy of protein solutions. Examples of structural information that are relevant to the identification of breakpoint regions include the location and type of protein secondary structure (alpha and 3-10 helices, parallel and anti-parallel beta sheets, chain reversals and turns, and loops; Kabsch and Sander, (1983) Biopolymers 22:2577-2637; the degree of solvent exposure of amino acid residues, the extent and type of interactions of residues with one another (Chothia, (1984) Ann. Rev. Biochem. 53:537-572) and the static and dynamic distribution of conformations along the polypeptide chain (Alber and Mathews, (1987) Methods Enzymol. 154:511-533). In some cases additional information is known about solvent exposure of residues; one example is a site of post-translational attachment of carbohydrate which is necessarily on the surface of the protein. When experimental structural information is not available or is not feasible to obtain, methods are also available to analyze the primary amino acid sequence in order to make predictions of protein tertiary and secondary structure, solvent accessibility and the occurrence of turns and loops. Biochemical methods are also sometimes applicable for empirically determining surface exposure when direct structural methods are not feasible; for example, using the identification of sites of chain scission following limited proteolysis in order to infer surface exposure (Gentile and Salvatore, (1993) Eur. J. Biochem. 218:603-621). Thus using either the experimentally derived structural information or predictive methods (e.g., Srinivisan and Rose, (1995) Proteins: Struct., Funct. & Genetics 22:81-99) the parental amino acid sequence is inspected to classify regions according to whether or not they are integral to the maintenance of secondary and tertiary structure. The occurrence of sequences within regions that are known to be involved in periodic secondary structure (alpha and 3-10 helices, parallel and anti-parallel beta sheets) are regions that should be avoided. Similarly, regions of amino acid sequence that are observed or PtIP- to have a low degree of solvent exposure are more likely to be part of the so-called hydrophobic core of the protein and should also be avoided for selection of amino and carboxyl termini. In contrast, those regions that are known or PtIP- to be in surface turns or loops, and especially those regions that are known not to be required for biological activity, are the preferred sites for location of the extremes of the polypeptide chain. Continuous stretches of amino acid sequence that are preferred based on the above criteria are referred to as a breakpoint region. Polynucleotides encoding circular permuted PtIP-83 polypeptides with new N-terminus/C-terminus which contain a linker region separating the original C-terminus and N-terminus can be made essentially following the method described in Mullins, et al., (1994) J. Am. Chem. Soc. 116:5529-5533. Multiple steps of polymerase chain reaction (PCR) amplifications are used to rearrange the DNA sequence encoding the primary amino acid sequence of the protein. Polynucleotides encoding circular permuted PtIP-83 polypeptides with new N-terminus/C-terminus which contain a linker region separating the original C-terminus and N-terminus can be made based on the tandem-duplication method described in Horlick, et al., (1992) Protein Eng. 5:427-431. Polymerase chain reaction (PCR) amplification of the new N-terminus/C-terminus genes is performed using a tandemly duplicated template DNA.

[0201] In another aspect fusion proteins are provided that include within its amino acid sequence an amino acid sequence comprising a PtIP-83 polypeptide including but not limited to the polypeptide of SEQ ID NO: 1, SEQ ID NO: 3, SEQ ID NO: 5, SEQ ID NO: 7, SEQ ID NO: 9, SEQ ID NO: 11, SEQ ID NO: 13, SEQ ID NO: 15, SEQ ID NO: 17, SEQ ID NO: 19, SEQ ID NO: 21, SEQ ID NO: 23, SEQ ID NO: 716, SEQ ID NO: 754, SEQ ID NO: 755, SEQ ID NO: 756, SEQ ID NO: 757, SEQ ID NO: 758, SEQ ID NO: 759, SEQ ID NO: 760, SEQ ID NO: 761, SEQ ID NO: 762, SEQ ID NO: 763, SEQ ID NO: 764, SEQ ID NO: 765, SEQ ID NO: 766, SEQ ID NO: 767, SEQ ID NO: 768, SEQ ID NO: 769, and active fragments thereof.

[0202] Methods for design and construction of fusion proteins (and polynucleotides encoding same) are known to those of skill in the art. Polynucleotides encoding a PtIP-83 polypeptide may be fused to signal sequences which will direct the localization of the PtIP-83 polypeptide to particular compartments of a prokaryotic or eukaryotic cell and/or direct the secretion of the PtIP-83 polypeptide of the embodiments from a prokaryotic or eukaryotic cell. For example, in E. coli, one may wish to direct the expression of the protein to the periplasmic space. Examples of signal sequences or proteins (or fragments thereof) to which the PtIP-83 polypeptide may be fused in order to direct the expression of the polypeptide to the periplasmic space of bacteria include, but are not limited to, the pelB signal sequence, the maltose binding protein (MBP) signal sequence, MBP, the ompA signal sequence, the signal sequence of the periplasmic E. coli heat-labile enterotoxin B-subunit and the signal sequence of alkaline phosphatase. Several vectors are commercially available for the construction of fusion proteins which will direct the localization of a protein, such as the pMAL series of vectors (particularly the pMAL-p series) available from New England Biolabs. In a specific embodiment, the PtIP-83 polypeptide may be fused to the pelB pectate lyase signal sequence to increase the efficiency of expression and purification of such polypeptides in Gram-negative bacteria (see, U.S. Pat. Nos. 5,576,195 and 5,846,818). Plant plastid transit peptide/polypeptide fusions are well known in the art (see, U.S. Pat. No. 7,193,133). Apoplast transit peptides such as rice or barley alpha-amylase secretion signal are also well known in the art. The plastid transit peptide is generally fused N-terminal to the polypeptide to be targeted (e.g., the fusion partner). In one embodiment, the fusion protein consists essentially of the plastid transit peptide and the PtIP-83 polypeptide to be targeted. In another embodiment, the fusion protein comprises the plastid transit peptide and the polypeptide to be targeted. In such embodiments, the plastid transit peptide is preferably at the N-terminus of the fusion protein. However, additional amino acid residues may be N-terminal to the plastid transit peptide providing that the fusion protein is at least partially targeted to a plastid. In a specific embodiment, the plastid transit peptide is in the N-terminal half, N-terminal third or N-terminal quarter of the fusion protein. Most or all of the plastid transit peptide is generally cleaved from the fusion protein upon insertion into the plastid. The position of cleavage may vary slightly between plant species, at different plant developmental stages, as a result of specific intercellular conditions or the particular combination of transit peptide/fusion partner used. In one embodiment, the plastid transit peptide cleavage is homogenous such that the cleavage site is identical in a population of fusion proteins. In another embodiment, the plastid transit peptide is not homogenous, such that the cleavage site varies by 1-10 amino acids in a population of fusion proteins. The plastid transit peptide can be recombinantly fused to a second protein in one of several ways. For example, a restriction endonuclease recognition site can be introduced into the nucleotide sequence of the transit peptide at a position corresponding to its C-terminal end and the same or a compatible site can be engineered into the nucleotide sequence of the protein to be targeted at its N-terminal end. Care must be taken in designing these sites to ensure that the coding sequences of the transit peptide and the second protein are kept “in frame” to allow the synthesis of the desired fusion protein. In some cases, it may be preferable to remove the initiator methionine codon of the second protein when the new restriction site is introduced. The introduction of restriction endonuclease recognition sites on both parent molecules and their subsequent joining through recombinant DNA techniques may result in the addition of one or more extra amino acids between the transit peptide and the second protein. This generally does not affect targeting activity as long as the transit peptide cleavage site remains accessible and the function of the second protein is not altered by the addition of these extra amino acids at its N-terminus. Alternatively, one skilled in the art can create a precise cleavage site between the transit peptide and the second protein (with or without its initiator methionine) using gene synthesis (Stemmer, et al., (1995) Gene 164:49-53) or similar methods. In addition, the transit peptide fusion can intentionally include amino acids downstream of the cleavage site. The amino acids at the N-terminus of the mature protein can affect the ability of the transit peptide to target proteins to plastids and/or the efficiency of cleavage following protein import. This may be dependent on the protein to be targeted. See, e.g., Comai, et al., (1988) J. Biol. Chem. 263(29): 15104-9.

[0203] In some embodiments fusion proteins are provide comprising a PtIP-83 polypeptide and an insecticidal polypeptide joined by an amino acid linker. In some embodiments fusion proteins are provided represented by a formula selected from the group consisting of:

R¹-L-R², R²-L-R¹, R¹-R² or R²-R¹

wherein R¹ is a PtIP-83 polypeptide, R² is a protein of interest. The R¹ polypeptide is fused either directly or through a linker (L) segment to the R² polypeptide. The term “directly” defines fusions in which the polypeptides are joined without a peptide linker. Thus “L” represents a chemical bound or polypeptide segment to which both R¹ and R² are fused in frame, most commonly L is a linear peptide to which R¹ and R² are bound by amide bonds linking the carboxy terminus of R¹ to the amino terminus of L and carboxy terminus of L to the amino terminus of R². By “fused in frame” is meant that there is no translation termination or disruption between the reading frames of R¹ and R². The linking group (L) is generally a polypeptide of between 1 and 500 amino acids in length. The linkers joining the two molecules are preferably designed to (1) allow the two molecules to fold and act independently of each other, (2) not have a propensity for developing an ordered secondary structure which could interfere with the functional domains of the two proteins, (3) have minimal hydrophobic or charged characteristic which could interact with the functional protein domains and (4) provide steric separation of R¹ and R² such that R¹ and R² could interact simultaneously with their corresponding receptors on a single cell. Typically surface amino acids in flexible protein regions include Gly, Asn and Ser. Virtually any permutation of amino acid sequences containing Gly, Asn and Ser would be expected to satisfy the above criteria for a linker sequence. Other neutral amino acids, such as Thr and Ala, may also be used in the linker sequence. Additional amino acids may also be included in the linkers due to the addition of unique restriction sites in the linker sequence to facilitate construction of the fusions.

[0204] In some embodiments the linkers comprise sequences selected from the group of formulas: (Gly₃Ser)ₙ, (Gly₄Ser)ₙ, (Gly₅Ser)ₙ, (GlyₙSer)ₙ or (AlaGlySer)ₙ where n is an integer. One example of a highly-flexible linker is the (GlySer)-rich spacer region present within the pill protein of the filamentous bacteriophages, e.g. bacteriophages M13 or fd (Schaller, et al., 1975). This region provides a long, flexible spacer region between two domains of the pill surface protein. Also included are linkers in which an endopeptidase recognition sequence is included. Such a cleavage site may be valuable to separate the individual components of the fusion to determine if they are properly folded and active in vitro. Examples of various endopeptidases include, but are not limited to, Plasmin, Enterokinase, Kallikerin, Urokinase, Tissue Plasminogen activator, clostripain, Chymosin, Collagenase, Russell's Viper Venom Protease, Postproline cleavage enzyme, V8 protease, Thrombin and factor Xa. In some embodiments the linker comprises the amino acids EEKKN (SEQ ID NO: 37) from the multi-gene expression vehicle (MGEV), which is cleaved by vacuolar proteases as disclosed in US Patent Application Publication Number US 2007/0277263. In other embodiments, peptide linker segments from the hinge region of heavy chain immunoglobulins IgG, IgA, IgM, IgD or IgE provide an angular relationship between the attached polypeptides. Especially useful are those hinge regions where the cysteines are replaced with serines. Linkers of the present disclosure include sequences derived from murine IgG gamma 2b hinge region in which the cysteines have been changed to serines. The fusion proteins are not limited by the form, size or number of linker sequences employed and the only requirement of the linker is that functionally it does not interfere adversely with the folding and function of the individual molecules of the fusion.

[0205] In another aspect chimeric PtIP-83 polypeptides are provided that are created through joining two or more portions of PtIP-83 genes, which originally encoded separate PtIP-83 proteins to create a chimeric gene. The translation of the chimeric gene results in a single chimeric PtIP-83 polypeptide with regions, motifs or domains derived from each of the original polypeptides. In certain embodiments the chimeric protein comprises portions, motifs or domains of PtIP-83 polypeptides of SEQ ID NO: 1, SEQ ID NO: 3, SEQ ID NO: 5, SEQ ID NO: 7, SEQ ID NO: 9, SEQ ID NO: 11, SEQ ID NO: 13, SEQ ID NO: 15, SEQ ID NO: 17, SEQ ID NO: 19, SEQ ID NO: 21, SEQ ID NO: 23, SEQ ID NO: 716, SEQ ID NO: 754, SEQ ID NO: 755, SEQ ID NO: 756, SEQ ID NO: 757, SEQ ID NO: 758, SEQ ID NO: 759, SEQ ID NO: 760, SEQ ID NO: 761, SEQ ID NO: 762, SEQ ID NO: 763, SEQ ID NO: 764, SEQ ID NO: 765, SEQ ID NO: 766, SEQ ID NO: 767, SEQ ID NO: 768, SEQ ID NO: 769, or SEQ ID NOs: 958-1026, in any combination.

[0206] In one embodiment, a chimeric PtIP-83 polypeptide comprises an N-terminal fragment of about 100, about 200, about 300, or about 400 amino acids of a PtIP-83 polypeptide heterologous to the C-terminal region of the chimeric PtIP-83 polypeptide. In a further embodiment the N-terminal fragment comprises conserved regions from about amino acid 1-65; about amino acids 78-88; and/or about amino acids 242-292, wherein the boundaries of those regions may vary by about 10 amino acids. In some embodiments, the PtIP-83 polypeptide comprises an N-terminal fragment comprises a PtIP-83Aa (SEQ ID NO: 1) N-terminal fragment. In some embodiments, the PtIP-83 polypeptide comprises an N-terminal fragment comprises a PtIP-83Cb (SEQ ID NO: 7) N-terminal fragment. In certain embodiments, a chimeric PtIP-83 polypeptide comprising an N-terminal fragment of either PtIP-83Aa (SEQ ID NO: 1) or PtIP-83Cb (SEQ ID NO: 7) alters the site of action of the chimeric PtIP-83 polypeptide compared to the original C-terminal fragment of the chimeric PtIP-83 polypeptide in a heterologous binding assay.

[0207] It is recognized that DNA sequences may be altered by various methods, and that these alterations may result in DNA sequences encoding proteins with amino acid sequences different than that encoded by the wild-type (or native) pesticidal protein. In some embodiments a PtIP-83 polypeptide may be altered in various ways including amino acid substitutions, deletions, truncations and insertions of one or more amino acids, including up to 2, 3, 4, 5, 6, 7, 8, 9, 10, 15, 20, 25, 30, 35, 40, 45, 50, 55, 60, 65, 70, 75, 80, 85, 90, 100, 105, 110, 115, 120, 125, 130, 135, 140, 145 or more amino acid substitutions, deletions and/or insertions or combinations thereof compared to any one of SEQ ID NO: 1, SEQ ID NO: 3, SEQ ID NO: 5, SEQ ID NO: 7, SEQ ID NO: 9, SEQ ID NO: 11, SEQ ID NO: 13, SEQ ID NO: 15, SEQ ID NO: 17, SEQ ID NO: 19, SEQ ID NO: 21, SEQ ID NO: 23, SEQ ID NO: 716, SEQ ID NO: 754, SEQ ID NO: 755, SEQ ID NO: 756, SEQ ID NO: 757, SEQ ID NO: 758, SEQ ID NO: 759, SEQ ID NO: 760, SEQ ID NO: 761, SEQ ID NO: 762, SEQ ID NO: 763, SEQ ID NO: 764, SEQ ID NO: 765, SEQ ID NO: 766, SEQ ID NO: 767, SEQ ID NO: 768, SEQ ID NO: 769, or SEQ ID NOs: 958-1026.

[0208] In some embodiments a PtIP-83 polypeptide variant comprises one or more amino acid substitution, of Table 13, Table 14, Table 15, Table 16, Table17, Table 18, Table 20, Table 21, Table 23, Table 24 or combinations thereof, compared to the native amino acid of PtIP-83Aa (SEQ ID NO: 1) at the corresponding residue.

[0209] In some embodiments a PtIP-83 polypeptide variant is selected from but not limited to any one of SEQ ID NO: 236-299, SEQ ID NO: 334-367, SEQ ID NO: 398-427, SEQ ID NO: 518-607, and SEQ ID NO: 728-737.

[0210] In some embodiments a PtIP-83 polypeptide comprises a deletion of 1, 2, 3, 4, 5, 6, 7, 8, 9, 10, 11, 12, 13, 14, 15 or more amino acids from the N-terminus of the PtIP-83 polypeptide relative to the amino acid position of any one of SEQ ID NO: 1, SEQ ID NO: 3, SEQ ID NO: 5, SEQ ID NO: 7, SEQ ID NO: 9, SEQ ID NO: 11, SEQ ID NO: 13, SEQ ID NO: 15, SEQ ID NO: 17, SEQ ID NO: 19, SEQ ID NO: 21, SEQ ID NO: 23, SEQ ID NO: 716, SEQ ID NO: 754, SEQ ID NO: 755, SEQ ID NO: 756, SEQ ID NO: 757, SEQ ID NO: 758, SEQ ID NO: 759, SEQ ID NO: 760, SEQ ID NO: 761, SEQ ID NO: 762, SEQ ID NO: 763, SEQ ID NO: 764, SEQ ID NO: 765, SEQ ID NO: 766, SEQ ID NO: 767, SEQ ID NO: 768, SEQ ID NO: 769, or SEQ ID NOs: 958-1026.

[0211] In some embodiments a PtIP-83 polypeptide comprises a deletion of 1, 2, 3, 4, 5, 6, 7, 8, 9, 10, 11, 12, 13, 14, 15 or more amino acids from the C-terminus of the PtIP-83 polypeptide relative to the amino acid position of any one of SEQ ID NO: 1, SEQ ID NO: 3, SEQ ID NO: 5, SEQ ID NO: 7, SEQ ID NO: 9, SEQ ID NO: 11, SEQ ID NO: 13, SEQ ID NO: 15, SEQ ID NO: 17, SEQ ID NO: 19, SEQ ID NO: 21, SEQ ID NO: 23, SEQ ID NO: 716, SEQ ID NO: 754, SEQ ID NO: 755, SEQ ID NO: 756, SEQ ID NO: 757, SEQ ID NO: 758, SEQ ID NO: 759, SEQ ID NO: 760, SEQ ID NO: 761, SEQ ID NO: 762, SEQ ID NO: 763, SEQ ID NO: 764, SEQ ID NO: 765, SEQ ID NO: 766, SEQ ID NO: 767, SEQ ID NO: 768, SEQ ID NO: 769, or SEQ ID NOs: 958-1026.

[0212] Methods for such manipulations are generally known in the art. For example, amino acid sequence variants of a PtIP-83 polypeptide can be prepared by mutations in the DNA. This may also be accomplished by one of several forms of mutagenesis and/or in directed evolution. In some aspects, the changes encoded in the amino acid sequence will not substantially affect the function of the protein. Such variants will possess the desired pesticidal activity. However, it is understood that the ability of a PtIP-83 polypeptide to confer pesticidal activity may be improved by the use of such techniques upon the compositions of this disclosure.

[0213] For example, conservative amino acid substitutions may be made at one or more, PtIP-, nonessential amino acid residues. A “nonessential” amino acid residue is a residue that can be altered from the wild-type sequence of a PtIP-83 without altering the biological activity. A “conservative amino acid substitution” is one in which the amino acid residue is replaced with an amino acid residue having a similar side chain. Families of amino acid residues having similar side chains have been defined in the art. These families include: amino acids with basic side chains (e.g., lysine, arginine, histidine); acidic side chains (e.g., aspartic acid, glutamic acid); polar, negatively charged residues and their amides (e.g., aspartic acid, asparagine, glutamic, acid, glutamine; uncharged polar side chains (e.g., glycine, asparagine, glutamine, serine, threonine, tyrosine, cysteine); small aliphatic, nonpolar or slightly polar residues (e.g., Alanine, serine, threonine, proline, glycine); nonpolar side chains (e.g., alanine, valine, leucine, isoleucine, proline, phenylalanine, methionine, tryptophan); large aliphatic, nonpolar residues (e.g., methionine, leucine, isoleucine, valine, cystine); beta-branched side chains (e.g., threonine, valine, isoleucine); aromatic side chains (e.g., tyrosine, phenylalanine, tryptophan, histidine); large aromatic side chains (e.g., tyrosine, phenylalanine, tryptophan).

[0214] Amino acid substitutions may be made in nonconserved regions that retain function. In general, such substitutions would not be made for conserved amino acid residues or for amino acid residues residing within a conserved motif, where such residues are essential for protein activity. Examples of residues that are conserved and that may be essential for protein activity include, for example, residues that are identical between all proteins contained in an alignment of similar or related toxins to the sequences of the embodiments (e.g., residues that are identical in an alignment of homologous proteins). Examples of residues that are conserved but that may allow conservative amino acid substitutions and still retain activity include, for example, residues that have only conservative substitutions between all proteins contained in an alignment of similar or related toxins to the sequences of the embodiments (e.g., residues that have only conservative substitutions between all proteins contained in the alignment homologous proteins). However, one of skill in the art would understand that functional variants may have minor conserved or nonconserved alterations in the conserved residues. Guidance as to appropriate amino acid substitutions that do not affect biological activity of the protein of interest may be found in the model of Dayhoff, et al., (1978) Atlas of Protein Sequence and Structure (Natl. Biomed. Res. Found., Washington, D.C.), herein incorporated by reference. In making such changes, the hydropathic index of amino acids may be considered. The importance of the hydropathic amino acid index in conferring interactive biologic function on a protein is generally understood in the art (Kyte and Doolittle, (1982) J Mol Biol. 157(1):105-32). It is accepted that the relative hydropathic character of the amino acid contributes to the secondary structure of the resultant protein, which in turn defines the interaction of the protein with other molecules, for example, enzymes, substrates, receptors, DNA, antibodies, antigens, and the like.

[0215] It is known in the art that certain amino acids may be substituted by other amino acids having a similar hydropathic index or score and still result in a protein with similar biological activity, i.e., still obtain a biological functionally equivalent protein. Each amino acid has been assigned a hydropathic index on the basis of its hydrophobicity and charge characteristics (Kyte and Doolittle, ibid). These are: isoleucine (+4.5); valine (+4.2); leucine (+3.8); phenylalanine (+2.8); cysteine/cystine (+2.5); methionine (+1.9); alanine (+1.8); glycine (−0.4); threonine (−0.7); serine (−0.8); tryptophan (−0.9); tyrosine (−1.3); proline (−1.6); histidine (−3.2); glutamate (−3.5); glutamine (−3.5); aspartate (−3.5); asparagine (−3.5); lysine (−3.9) and arginine (−4.5). In making such changes, the substitution of amino acids whose hydropathic indices are within +2 is preferred, those which are within +1 are particularly preferred, and those within +0.5 are even more particularly preferred.

[0216] It is also understood in the art that the substitution of like amino acids can be made effectively on the basis of hydrophilicity. U.S. Pat. No. 4,554,101, states that the greatest local average hydrophilicity of a protein, as governed by the hydrophilicity of its adjacent amino acids, correlates with a biological property of the protein.

[0217] As detailed in U.S. Pat. No. 4,554,101, the following hydrophilicity values have been assigned to amino acid residues: arginine (+3.0); lysine (+3.0); aspartate (+3.0.+0.1); glutamate (+3.0.+0.1); serine (+0.3); asparagine (+0.2); glutamine (+0.2); glycine (0); threonine (−0.4); proline (−0.5.+0.1); alanine (−0.5); histidine (−0.5); cysteine (−1.0); methionine (−1.3); valine (−1.5); leucine (−1.8); isoleucine (−1.8); tyrosine (−2.3); phenylalanine (−2.5); tryptophan (−3.4).

[0218] Alternatively, alterations may be made to the protein sequence of many proteins at the amino or carboxy terminus without substantially affecting activity. This can include insertions, deletions or alterations introduced by modern molecular methods, such as PCR, including PCR amplifications that alter or extend the protein coding sequence by virtue of inclusion of amino acid encoding sequences in the oligonucleotides utilized in the PCR amplification. Alternatively, the protein sequences added can include entire protein-coding sequences, such as those used commonly in the art to generate protein fusions. Such fusion proteins are often used to (1) increase expression of a protein of interest (2) introduce a binding domain, enzymatic activity or epitope to facilitate either protein purification, protein detection or other experimental uses known in the art (3) target secretion or translation of a protein to a subcellular organelle, such as the periplasmic space of Gram-negative bacteria, mitochondria or chloroplasts of plants or the endoplasmic reticulum of eukaryotic cells, the latter of which often results in glycosylation of the protein.

[0219] Variant nucleotide and amino acid sequences of the disclosure also encompass sequences derived from mutagenic and recombinogenic procedures such as DNA shuffling. With such a procedure, one or more different PtIP-83 polypeptide coding regions can be used to create a new PtIP-83 polypeptide possessing the desired properties. In this manner, libraries of recombinant polynucleotides are generated from a population of related sequence polynucleotides comprising sequence regions that have substantial sequence identity and can be homologously recombined in vitro or in vivo. For example, using this approach, sequence motifs encoding a domain of interest may be shuffled between a pesticidal gene and other known pesticidal genes to obtain a new gene coding for a protein with an improved property of interest, such as an increased insecticidal activity. Strategies for such DNA shuffling are known in the art. See, for example, Stemmer, (1994) Proc. Natl. Acad. Sci. USA 91:10747-10751; Stemmer, (1994) Nature 370:389-391; Crameri, et al., (1997) Nature Biotech. 15:436-438; Moore, et al., (1997) J. Mol. Biol. 272:336-347; Zhang, et al., (1997) Proc. Natl. Acad. Sci. USA 94:4504-4509; Crameri, et al., (1998) Nature 391:288-291; and U.S. Pat. Nos. 5,605,793 and 5,837,458.

[0220] Domain swapping or shuffling is another mechanism for generating altered PtIP-83 polypeptides. Domains may be swapped between PtIP-83 polypeptides resulting in hybrid or chimeric toxins with improved insecticidal activity or target spectrum. Methods for generating recombinant proteins and testing them for pesticidal activity are well known in the art (see, for example, Naimov, et al., (2001) Appl. Environ. Microbiol. 67:5328-5330; de Maagd, et al., (1996) Appl. Environ. Microbiol. 62:1537-1543; Ge, et al., (1991) J. Biol. Chem. 266:17954-17958; Schnepf, et al., (1990) J. Biol. Chem. 265:20923-20930; Rang, et al., 91999) Appl. Environ. Microbiol. 65:2918-2925).

[0221] Alignment of PtIP-83 homologs (FIG. 2) allows for identification of residues that are highly conserved among natural homologs in this family.

[0222] In some embodiments PtIP-83 polypeptides are provided comprising an amino acid sequence having at least 80%, at least 85%, at least 90%, at least 95%, at least 96%, at least 97%, at least 98% or at least 99% sequence identity to any one of SEQ ID NO: 786-888.

[0223] In some embodiments PtIP-83 polypeptides are provide comprising the amino acid sequence of any one of SEQ ID NO: 786-888.

[0224] In some embodiments the PtIP-83 polypeptide is not the amino acid sequence of any one of SEQ ID NO: 786-888.

### Compositions

[0225] Compositions comprising a PtIP-83 polypeptide of the disclosure are also embraced. In some embodiments the composition comprises a PtIP-83 polypeptide of SEQ ID NO: 1, SEQ ID NO: 3, SEQ ID NO: 5, SEQ ID NO: 7, SEQ ID NO: 9, SEQ ID NO: 11, SEQ ID NO: 13, SEQ ID NO: 15, SEQ ID NO: 17, SEQ ID NO: 19, SEQ ID NO: 21, SEQ ID NO: 23, SEQ ID NO: 716, SEQ ID NO: 754, SEQ ID NO: 755, SEQ ID NO: 756, SEQ ID NO: 757, SEQ ID NO: 758, SEQ ID NO: 759, SEQ ID NO: 760, SEQ ID NO: 761, SEQ ID NO: 762, SEQ ID NO: 763, SEQ ID NO: 764, SEQ ID NO: 765, SEQ ID NO: 766, SEQ ID NO: 767, SEQ ID NO: 768, SEQ ID NO: 769, or SEQ ID NOs: 958-1026or a variant thereof. In some embodiments the composition comprises a PtIP-83 fusion protein.

[0226] In some embodiments compositions are provided comprising a PtIP-83 polypeptide comprising an amino acid sequence of any one of SEQ ID NO: 236-299, SEQ ID NO: 334-367, SEQ ID NO: 398-427, SEQ ID NO: 518-607, SEQ ID NO: 640-645, and SEQ ID NO: 728-737 or a variant thereof.

[0227] In some embodiments compositions are provide comprising a PtIP-83 polypeptide comprising the amino acid sequence of any one of SEQ ID NO: 786-888 or a variant thereof.

[0228] In some embodiments agricultural compositions of PtIP-83 polypeptides are disclosed. In the embodiments, a transformed microorganism (which includes whole organisms, cells, spore(s), PtIP-83 polypeptide(s), pesticidal component(s), pest-impacting component(s), variant(s), living or dead cells and cell components, including mixtures of living and dead cells and cell components, and including broken cells and cell components) or an isolated PtIP-83 polypeptide(s) can be formulated with an acceptable carrier into a pesticidal composition(s) that is, for example, a suspension, a solution, an emulsion, a dusting powder, a dispersible granule or pellet, a wettable powder, and an emulsifiable concentrate, an aerosol or spray, an impregnated granule, an adjuvant, a coatable paste, a colloid, and also encapsulations in, for example, polymer substances. Such formulated compositions may be prepared by such conventional means as desiccation, lyophilization, homogenization, extraction, filtration, centrifugation, sedimentation, or concentration of a culture of cells comprising the polypeptide.

[0229] Such compositions disclosed above may be obtained by the addition of a surface-active agent, an inert carrier, a preservative, a humectant, a feeding stimulant, an attractant, an encapsulating agent, a binder, an emulsifier, a dye, a UV protectant, a buffer, a flow agent or fertilizers, micronutrient donors, or other preparations that influence plant growth. One or more agrochemicals including, but not limited to, herbicides, insecticides, fungicides, bactericides, nematocides, molluscicides, acaricides, plant growth regulators, harvest aids, and fertilizers, can be combined with carriers, surfactants or adjuvants customarily employed in the art of formulation or other components to facilitate product handling and application for particular target pests. Suitable carriers and adjuvants can be solid or liquid and correspond to the substances ordinarily employed in formulation technology, e.g., natural or regenerated mineral substances, solvents, dispersants, wetting agents, tackifiers, binders, or fertilizers. The active ingredients of the embodiments are normally applied in the form of compositions and can be applied to the crop area, plant, or seed to be treated. For example, the compositions of the embodiments may be applied to grain in preparation for or during storage in a grain bin or silo, etc. The compositions of the embodiments may be applied simultaneously or in succession with other compounds. Methods of applying an active ingredient of the embodiments or an agrochemical composition of the embodiments that contains at least one of the Cyt1A variant polypeptides produced by the bacterial strains of the embodiments include, but are not limited to, foliar application, seed coating, and soil application. The number of applications and the rate of application depend on the intensity of infestation by the corresponding pest.

[0230] Suitable surface-active agents include, but are not limited to, anionic compounds such as a carboxylate of, for example, a metal; a carboxylate of a long chain fatty acid; an N-acylsarcosinate; mono or di-esters of phosphoric acid with fatty alcohol ethoxylates or salts of such esters; fatty alcohol sulfates such as sodium dodecyl sulfate, sodium octadecyl sulfate or sodium cetyl sulfate; ethoxylated fatty alcohol sulfates; ethoxylated alkylphenol sulfates; lignin sulfonates; petroleum sulfonates; alkyl aryl sulfonates such as alkyl-benzene sulfonates or lower alkylnaphtalene sulfonates, e.g., butyl-naphthalene sulfonate; salts of sulfonated naphthalene-formaldehyde condensates; salts of sulfonated phenol-formaldehyde condensates; more complex sulfonates such as the amide sulfonates, e.g., the sulfonated condensation product of oleic acid and N-methyl taurine; or the dialkyl sulfosuccinates, e.g., the sodium sulfonate of dioctyl succinate. Non-ionic agents include condensation products of fatty acid esters, fatty alcohols, fatty acid amides or fatty-alkyl- or alkenyl-substituted phenols with ethylene oxide, fatty esters of polyhydric alcohol ethers, e.g., sorbitan fatty acid esters, condensation products of such esters with ethylene oxide, e.g., polyoxyethylene sorbitar fatty acid esters, block copolymers of ethylene oxide and propylene oxide, acetylenic glycols such as 2,4,7,9-tetraethyl-5-decyn-4,7-diol, or ethoxylated acetylenic glycols. Examples of a cationic surface-active agent include, for instance, an aliphatic mono-, di-, or polyamine such as an acetate, naphthenate or oleate; or oxygen-containing amine such as an amine oxide of polyoxyethylene alkylamine; an amide-linked amine prepared by the condensation of a carboxylic acid with a di- or polyamine; or a quaternary ammonium salt.

[0231] Examples of inert materials include but are not limited to inorganic minerals such as kaolin, phyllosilicates, carbonates, sulfates, phosphates, Mica, Amorphous Silica Gel, talc, clay, volcanic ash or botanical materials such as cork, powdered corncobs, peanut hulls, rice hulls, and walnut shells. Kaolins such as kaolinite, dickite, nacrite, anauxite, halloysite and endellite are useful as carrier materials. Montmorillonites, such as beidellite, nontronite, montmorillonite, hectorite, saponite, sauconite and bentonite are useful as carrier materials. Vermiculites such as biotite are useful as carrier materials.

[0232] The compositions of the embodiments can be in a suitable form for direct application or as a concentrate of primary composition that requires dilution with a suitable quantity of water or other diluent before application. The pesticidal concentration will vary depending upon the nature of the particular formulation, specifically, whether it is a concentrate or to be used directly. The composition contains 1 to 98% of a solid or liquid inert carrier, and 0 to 50% or 0.1 to 50% of a surfactant. These compositions will be administered at the labeled rate for the commercial product, for example, about 0.01 lb-5.0 lb. per acre when in dry form and at about 0.01 pts.-10 pts. per acre when in liquid form.

### Antibodies

[0233] Antibodies to a PtIP-83 polypeptide of the embodiments or to variants or fragments thereof are also encompassed. The antibodies of the disclosure include polyclonal and monoclonal antibodies as well as fragments thereof which retain their ability to bind to PtIP-83 polypeptide found in the insect gut. An antibody, monoclonal antibody or fragment thereof is said to be capable of binding a molecule if it is capable of specifically reacting with the molecule to thereby bind the molecule to the antibody, monoclonal antibody or fragment thereof. The term “antibody” (Ab) or “monoclonal antibody” (Mab) is meant to include intact molecules as well as fragments or binding regions or domains thereof (such as, for example, Fab and F(ab).sub.2 fragments) which are capable of binding hapten. Such fragments are typically produced by proteolytic cleavage, such as papain or pepsin. Alternatively, hapten-binding fragments can be produced through the application of recombinant DNA technology or through synthetic chemistry. Methods for the preparation of the antibodies of the present disclosure are generally known in the art. For example, see, Antibodies, A Laboratory Manual, Ed Harlow and David Lane (eds.) Cold Spring Harbor Laboratory, N.Y. (1988), as well as the references cited therein. Standard reference works setting forth the general principles of immunology include: Klein, J. Immunology: The Science of Cell-Noncell Discrimination, John Wiley & Sons, N.Y. (1982); Dennett, et al., Monoclonal Antibodies, Hybridoma: A New Dimension in Biological Analyses, Plenum Press, N.Y. (1980) and Campbell, “Monoclonal Antibody Technology,” In Laboratory Techniques in Biochemistry and Molecular Biology, Vol. 13, Burdon, et al., (eds.), Elsevier, Amsterdam (1984). See also, U.S. Pat. Nos. 4,196,265; 4,609,893; 4,713,325; 4,714,681; 4,716,111; 4,716,117 and 4,720,459. PtIP-83 polypeptide antibodies or antigen-binding portions thereof can be produced by a variety of techniques, including conventional monoclonal antibody methodology, for example the standard somatic cell hybridization technique of Kohler and Milstein, (1975) Nature 256:495. Other techniques for producing monoclonal antibody can also be employed such as viral or oncogenic transformation of B lymphocytes. An animal system for preparing hybridomas is a murine system. Immunization protocols and techniques for isolation of immunized splenocytes for fusion are known in the art. Fusion partners (e.g., murine myeloma cells) and fusion procedures are also known. The antibody and monoclonal antibodies of the disclosure can be prepared by utilizing a PtIP-83 polypeptide as antigens.

[0234] A kit for detecting the presence of a PtIP-83 polypeptide or detecting the presence of a nucleotide sequence encoding a PtIP-83 polypeptide in a sample is provided. In one embodiment, the kit provides antibody-based reagents for detecting the presence of a PtIP-83 polypeptide in a tissue sample. In another embodiment, the kit provides labeled nucleic acid probes useful for detecting the presence of one or more polynucleotides encoding PtIP-83 polypeptide. The kit is provided along with appropriate reagents and controls for carrying out a detection method, as well as instructions for use of the kit.

### Receptor Identification and Isolation

[0235] Receptors to the PtIP-83 polypeptide of the embodiments or to variants or fragments thereof, are also encompassed. Methods for identifying receptors are well known in the art (see, Hofmann, et. al., (1988) Eur. J. Biochem. 173:85-91; Gill, et al., (1995) J. Biol. Chem. 27277-27282) can be employed to identify and isolate the receptor that recognizes the PtIP-83 polypeptide using the brush-border membrane vesicles from susceptible insects. In addition to the radioactive labeling method listed in the cited literatures, PtIP-83 polypeptide can be labeled with fluorescent dye and other common labels such as streptavidin. Brush-border membrane vesicles (BBMV) of susceptible insects such as soybean looper and stink bugs can be prepared according to the protocols listed in the references and separated on SDS-PAGE gel and blotted on suitable membrane. Labeled PtIP-83 polypeptide can be incubated with blotted membrane of BBMV and labeled the PtIP-83 polypeptide can be identified with the labeled reporters. Identification of protein band(s) that interact with the PtIP-83 polypeptide can be detected by N-terminal amino acid gas phase sequencing or mass spectrometry based protein identification method (Patterson, (1998) 10.22, 1-24, Current Protocol in Molecular Biology published by John Wiley & Son Inc). Once the protein is identified, the corresponding gene can be cloned from genomic DNA or cDNA library of the susceptible insects and binding affinity can be measured directly with the PtIP-83 polypeptide. Receptor function for insecticidal activity by the PtIP-83 polypeptide can be verified by accomplished by RNAi type of gene knock out method (Rajagopal, et al., (2002) J. Biol. Chem. 277:46849-46851).

### Nucleotide Constructs, Expression Cassettes and Vectors

[0236] The use of the term “nucleotide constructs” herein is not intended to limit the embodiments to nucleotide constructs comprising DNA. Those of ordinary skill in the art will recognize that nucleotide constructs particularly polynucleotides and oligonucleotides composed of ribonucleotides and combinations of ribonucleotides and deoxyribonucleotides may also be employed in the methods disclosed herein. The nucleotide constructs, nucleic acids, and nucleotide sequences of the embodiments additionally encompass all complementary forms of such constructs, molecules, and sequences. Further, the nucleotide constructs, nucleotide molecules, and nucleotide sequences of the embodiments encompass all nucleotide constructs, molecules, and sequences which can be employed in the methods of the embodiments for transforming plants including, but not limited to, those comprised of deoxyribonucleotides, ribonucleotides, and combinations thereof. Such deoxyribonucleotides and ribonucleotides include both naturally occurring molecules and synthetic analogues. The nucleotide constructs, nucleic acids, and nucleotide sequences of the embodiments also encompass all forms of nucleotide constructs including, but not limited to, single-stranded forms, double-stranded forms, hairpins, stem-and-loop structures and the like. A further embodiment relates to a transformed organism such as an organism selected from plant and insect cells, bacteria, yeast, baculovirus, protozoa, nematodes and algae. The transformed organism comprises a DNA molecule of the embodiments, an expression cassette comprising the DNA molecule or a vector comprising the expression cassette, which may be stably incorporated into the genome of the transformed organism.

[0237] In some embodiments transgenic host cells are provide transformed with a polynucleotide encoding a PtIP-83 polypeptide of the disclosure. In some embodiments the host cell is a plant cell. In some embodiments the host cell is a bacteria. The sequences of the embodiments are provided in DNA constructs for expression in the organism of interest. The construct will include 5′ and 3′ regulatory sequences operably linked to a sequence of the embodiments. The term “operably linked” as used herein refers to a functional linkage between a promoter and a second sequence, wherein the promoter sequence initiates and mediates transcription of the DNA sequence corresponding to the second sequence. Generally, operably linked means that the nucleic acid sequences being linked are contiguous and where necessary to join two protein coding regions in the same reading frame. The construct may additionally contain at least one additional gene to be cotransformed into the organism. Alternatively, the additional gene(s) can be provided on multiple DNA constructs.

[0238] Such a DNA construct is provided with a plurality of restriction sites for insertion of the PtIP-83 polypeptide gene sequence to be under the transcriptional regulation of the regulatory regions. The DNA construct may additionally contain selectable marker genes. The DNA construct will generally include in the 5′ to 3′ direction of transcription: a transcriptional and translational initiation region (i.e., a promoter), a DNA sequence of the embodiments, and a transcriptional and translational termination region (i.e., termination region) functional in the organism serving as a host. The transcriptional initiation region (i.e., the promoter) may be native, analogous, foreign or heterologous to the host organism and/or to the sequence of the embodiments. Additionally, the promoter may be the natural sequence or alternatively a synthetic sequence. The term “foreign” as used herein indicates that the promoter is not found in the native organism into which the promoter is introduced. Where the promoter is “foreign” or “heterologous” to the sequence of the embodiments, it is intended that the promoter is not the native or naturally occurring promoter for the operably linked sequence of the embodiments. As used herein, a chimeric gene comprises a coding sequence operably linked to a transcription initiation region that is heterologous to the coding sequence. Where the promoter is a native or natural sequence, the expression of the operably linked sequence is altered from the wild-type expression, which results in an alteration in phenotype.

[0239] In some embodiments the DNA construct may also include a transcriptional enhancer sequence. As used herein, the term an “enhancer” refers to a DNA sequence which can stimulate promoter activity, and may be an innate element of the promoter or a heterologous element inserted to enhance the level or tissue-specificity of a promoter. Various enhancers are known in the art including for example, introns with gene expression enhancing properties in plants (US Patent Application Publication Number 2009/0144863, the ubiquitin intron (i.e., the maize ubiquitin intron 1 (see, for example, NCBI sequence S94464)), the omega enhancer or the omega prime enhancer (Gallie, et al., (1989) Molecular Biology of RNA ed. Cech (Liss, New York) 237-256 and Gallie, et al., (1987) Gene 60:217-25), the CaMV 35S enhancer (see, e.g., Benfey, et al., (1990) EMBO J. 9:1685-96) and the enhancers of U.S. Pat. No. 7,803,992 may also be used, each of which is incorporated by reference. The above list of transcriptional enhancers is not meant to be limiting. Any appropriate transcriptional enhancer can be used in the embodiments.

[0240] The termination region may be native with the transcriptional initiation region, may be native with the operably linked DNA sequence of interest, may be native with the plant host or may be derived from another source (i.e., foreign or heterologous to the promoter, the sequence of interest, the plant host or any combination thereof).

[0241] Convenient termination regions are available from the Ti-plasmid of A. tumefaciens, such as the octopine synthase and nopaline synthase termination regions. In one embodiment, the terminator is the ubiquitin 14 terminator (Callis, J. et al. (1995) Genetics 139, 921-39). See also, Guerineau, et al., (1991) Mol. Gen. Genet. 262:141-144; Proudfoot, (1991) Cell 64:671-674; Sanfacon, et al., (1991) Genes Dev. 5:141-149; Mogen, et al., (1990) Plant Cell 2:1261-1272; Munroe, et al., (1990) Gene 91:151-158; Ballas, et al., (1989) Nucleic Acids Res. 17:7891-7903 and Joshi, et al., (1987) Nucleic Acid Res. 15:9627-9639.

[0242] Where appropriate, a nucleic acid may be optimized for increased expression in the host organism. Thus, where the host organism is a plant, the synthetic nucleic acids can be synthesized using plant-preferred codons for improved expression. See, for example, Campbell and Gowri, (1990) Plant Physiol. 92:1-11 for a discussion of host-preferred codon usage. For example, although nucleic acid sequences of the embodiments may be expressed in both monocotyledonous and dicotyledonous plant species, sequences can be modified to account for the specific codon preferences and GC content preferences of monocotyledons or dicotyledons as these preferences have been shown to differ (Murray et al. (1989) Nucleic Acids Res. 17:477-498). Thus, the maize-preferred codon for a particular amino acid may be derived from known gene sequences from maize. Maize codon usage for 28 genes from maize plants is listed in Table 4 of Murray, et al., supra. Methods are available in the art for synthesizing plant-preferred genes. See, for example, Murray, et al., (1989) Nucleic Acids Res. 17:477-498, and Liu H et al. Mol Bio Rep 37:677-684, 2010, herein incorporated by reference. A Zea maize codon usage table can be also found at kazusa.or.jp/codon/cgi-bin/showcodon.cgi?species=4577, which can be accessed using the www prefix. Table 3 shows a maize optimal codon analysis (adapted from Liu H et al. Mol Bio Rep 37:677-684, 2010).

TABLE 3

| Amino | | High | | Low | | Amino | | High | | Low | |
|---|---|---|---|---|---|---|---|---|---|---|---|
| Acid | Codon | Count | RSCU | Count | RSCU | Acid | Codon | Count | RSCU | Count | RSCU |
| Phe | UUU | 115 | 0.04 | 2,301 | 1.22 | Ala | GCU | 629 | 0.17 | 3,063 | 1.59 |
| | UUC* | 5,269 | 1.96 | 1,485 | 0.78 | | GCC* | 8,057 | 2.16 | 1,136 | 0.59 |
| Ser | UCU | 176 | 0.13 | 2,498 | 1.48 | | GCA | 369 | 0.1 | 2,872 | 1.49 |
| | UCC* | 3,489 | 2.48 | 1,074 | 0.63 | | GCG* | 5,835 | 1.57 | 630 | 0.33 |
| | UCA | 104 | 0.07 | 2,610 | 1.54 | Tyr | UAU | 71 | 0.04 | 1,632 | 1.22 |
| | UCG* | 1,975 | 1.4 | 670 | 0.4 | | UAC* | 3,841 | 1.96 | 1,041 | 0.78 |
| | AGU | 77 | 0.05 | 1,788 | 1.06 | His | CAU | 131 | 0.09 | 1,902 | 1.36 |
| | AGC* | 2,617 | 1.86 | 1,514 | 0.89 | | CAC* | 2,800 | 1.91 | 897 | 0.64 |
| Leu | UUA | 10 | 0.01 | 1,326 | 0.79 | Cys | UGU | 52 | 0.04 | 1,233 | 1.12 |
| | UUG | 174 | 0.09 | 2,306 | 1.37 | | UGC* | 2,291 | 1.96 | 963 | 0.88 |
| | CUU | 223 | 0.11 | 2,396 | 1.43 | Gln | CAA | 99 | 0.05 | 2,312 | 1.04 |
| | CUC* | 5,979 | 3.08 | 1,109 | 0.66 | | CAG* | 3,557 | 1.95 | 2,130 | 0.96 |
| | CUA | 106 | 0.05 | 1,280 | 0.76 | Arg | CGU | 153 | 0.12 | 751 | 0.74 |
| | CUG* | 5,161 | 2.66 | 1,646 | 0.98 | | CGC* | 4,278 | 3.25 | 466 | 0.46 |
| Pro | CCU | 427 | 0.22 | 1,900 | 1.47 | | CGA | 92 | 0.07 | 659 | 0.65 |
| | CCC* | 3,035 | 1.59 | 601 | 0.47 | | CGG* | 1,793 | 1.36 | 631 | 0.62 |
| | CCA | 311 | 0.16 | 2,140 | 1.66 | | AGA | 83 | 0.06 | 1,948 | 1.91 |
| | CCG* | 3,846 | 2.02 | 513 | 0.4 | | AGG* | 1,493 | 1.14 | 1,652 | 1.62 |
| Ile | AUU | 138 | 0.09 | 2,388 | 1.3 | Asn | AAU | 131 | 0.07 | 3,074 | 1.26 |
| | AUC* | 4,380 | 2.85 | 1,353 | 0.74 | | AAC* | 3,814 | 1.93 | 1,807 | 0.74 |
| | AUA | 88 | 0.06 | 1,756 | 0.96 | Lys | AAA | 130 | 0.05 | 3,215 | 0.98 |
| Thr | ACU | 136 | 0.09 | 1,990 | 1.43 | | AAG* | 5,047 | 1.95 | 3,340 | 1.02 |
| | ACC* | 3,398 | 2.25 | 991 | 0.71 | Asp | GAU | 312 | 0.09 | 4,217 | 1.38 |
| | ACA | 133 | 0.09 | 2,075 | 1.5 | | GAC* | 6,729 | 1.91 | 1,891 | 0.62 |
| | ACG* | 2,378 | 1.57 | 495 | 0.36 | Gly | GGU | 363 | 0.13 | 2,301 | 1.35 |
| Val | GUU | 182 | 0.07 | 2,595 | 1.51 | | GGC* | 7,842 | 2.91 | 1,282 | 0.75 |
| | GUC* | 4,584 | 1.82 | 1,096 | 0.64 | | GGA | 397 | 0.15 | 2,044 | 1.19 |
| | GUA | 74 | 0.03 | 1,325 | 0.77 | | GGG* | 2,186 | 0.81 | 1,215 | 0.71 |
| | GUG* | 5,257 | 2.08 | 1,842 | 1.07 | Glu | GAA | 193 | 0.06 | 4,080 | 1.1 |
| | | | | | | | GAG* | 6,010 | 1.94 | 3,307 | 0.9 |

Codon usage was compared using Chi squared contingency test to identify optimal codons. Codons that occur significantly more often (P\0.01) are indicated with an asterisk.

TABLE 4

| | | | | | | | |
|---|---|---|---|---|---|---|---|
| TTT | F | 21.2 | (10493) | TCT | S | 18.4 | (9107) |
| TTC | F | 21.2 | (10487) | TCC | S | 12.9 | (6409) |
| TTA | L | 9.2 | (4545) | TCA | S | 15.6 | (7712) |
| TTG | L | 22.9 | (11340) | TCG | S | 4.8 | (2397) |
| CTT | L | 23.9 | (11829) | CCT | P | 18.9 | (9358) |
| CTC | L | 17.1 | (8479) | CCC | P | 10.1 | (5010) |
| CTA | L | 8.5 | (4216) | CCA | P | 19.1 | (9461) |
| CTG | L | 12.7 | (6304) | CCG | P | 4.7 | (2312) |
| ATT | I | 25.1 | (12411) | ACT | T | 17.1 | (8490) |
| ATC | I | 16.3 | (8071) | ACC | T | 14.3 | (7100) |
| ATA | I | 12.9 | (6386) | ACA | T | 14.9 | (7391) |
| ATG | M | 22.7 | (11218) | ACG | T | 4.3 | (2147) |
| GTT | V | 26.1 | (12911) | GCT | A | 26.7 | (13201) |
| GTC | V | 11.9 | (5894) | GCC | A | 16.2 | (8026) |
| GTA | V | 7.7 | (3803) | GCA | A | 21.4 | (10577) |
| GTG | V | 21.4 | (10610) | GCG | A | 6.3 | (3123) |
| TAT | Y | 15.7 | (7779) | TGT | C | 8.1 | (3995) |
| TAC | Y | 14.9 | (7367) | TGC | C | 8.0 | (3980) |
| TAA | * | 0.9 | (463) | TGA | * | 1.0 | (480) |
| TAG | * | 0.5 | (263) | TGG | W | 13.0 | (6412) |
| CAT | H | 14.0 | (6930) | CGT | R | 6.6 | (3291) |
| CAC | H | 11.6 | (5759) | CGC | R | 6.2 | (3093) |
| CAA | Q | 20.5 | (10162) | CGA | R | 4.1 | (2018) |
| CAG | Q | 16.2 | (8038) | CGG | R | 3.1 | (1510) |
| AAT | N | 22.4 | (11088) | AGT | S | 12.6 | (6237) |
| AAC | N | 22.8 | (11284) | AGC | S | 11.3 | (5594) |
| AAA | K | 26.9 | (13334) | AGA | R | 14.8 | (7337) |
| AAG | K | 35.9 | (17797) | AGG | R | 13.3 | (6574) |
| GAT | D | 32.4 | (16040) | GGT | G | 20.9 | (10353) |
| GAC | D | 20.4 | (10097) | GGC | G | 13.4 | (6650) |
| GAA | E | 33.2 | (16438) | GGA | G | 22.3 | (11022) |
| GAG | E | 33.2 | (16426) | GGG | G | 13.0 | (6431) |

[0243] A Glycine max codon usage table is shown in Table 4 and can also be found at kazusa.or.jp/codon/cgi-bin/showcodon.cgi?species=3847&aa=1&style=N, which can be accessed using the www prefix.

[0244] In some embodiments the recombinant nucleic acid molecule encoding a PtIP-83 polypeptide has maize optimized codons.

[0245] Additional sequence modifications are known to enhance gene expression in a cellular host. These include elimination of sequences encoding spurious polyadenylation signals, exon-intron splice site signals, transposon-like repeats, and other well-characterized sequences that may be deleterious to gene expression. The GC content of the sequence may be adjusted to levels average for a given cellular host, as calculated by reference to known genes expressed in the host cell. The term “host cell” as used herein refers to a cell which contains a vector and supports the replication and/or expression of the expression vector is intended. Host cells may be prokaryotic cells such as E. coli or eukaryotic cells such as yeast, insect, amphibian or mammalian cells or monocotyledonous or dicotyledonous plant cells. An example of a monocotyledonous host cell is a maize host cell. When possible, the sequence is modified to avoid PtIP-hairpin secondary mRNA structures.

[0246] The expression cassettes may additionally contain 5′ leader sequences. Such leader sequences can act to enhance translation. Translation leaders are known in the art and include: picornavirus leaders, for example, EMCV leader (Encephalomyocarditis 5′ noncoding region) (Elroy-Stein, et al., (1989) Proc. Natl. Acad. Sci. USA 86:6126-6130); potyvirus leaders, for example, TEV leader (Tobacco Etch Virus) (Gallie, et al., (1995) Gene 165(2):233-238), MDMV leader (Maize Dwarf Mosaic Virus), human immunoglobulin heavy-chain binding protein (BiP) (Macejak, et al., (1991) Nature 353:90-94); untranslated leader from the coat protein mRNA of alfalfa mosaic virus (AMV RNA 4) (Jobling, et al., (1987) Nature 325:622-625); tobacco mosaic virus leader (TMV) (Gallie, et al., (1989) in Molecular Biology of RNA, ed. Cech (Liss, New York), pp. 237-256) and maize chlorotic mottle virus leader (MCMV) (Lommel, et al., (1991) Virology 81:382-385). See also, Della-Cioppa, et al., (1987) Plant Physiol. 84:965-968. Such constructs may also contain a “signal sequence” or “leader sequence” to facilitate co-translational or post-translational transport of the peptide to certain intracellular structures such as the chloroplast (or other plastid), endoplasmic reticulum or Golgi apparatus.

[0247] “Signal sequence” as used herein refers to a sequence that is known or suspected to result in cotranslational or post-translational peptide transport across the cell membrane. In eukaryotes, this typically involves secretion into the Golgi apparatus, with some resulting glycosylation. Insecticidal toxins of bacteria are often synthesized as protoxins, which are protolytically activated in the gut of the target pest (Chang, (1987) Methods Enzymol. 153:507-516). In some embodiments, the signal sequence is located in the native sequence or may be derived from a sequence of the embodiments. “Leader sequence” as used herein refers to any sequence that when translated, results in an amino acid sequence sufficient to trigger co-translational transport of the peptide chain to a subcellular organelle. Thus, this includes leader sequences targeting transport and/or glycosylation by passage into the endoplasmic reticulum, passage to vacuoles, plastids including chloroplasts, mitochondria, and the like. Nuclear-encoded proteins targeted to the chloroplast thylakoid lumen compartment have a characteristic bipartite transit peptide, composed of a stromal targeting signal peptide and a lumen targeting signal peptide. The stromal targeting information is in the amino-proximal portion of the transit peptide. The lumen targeting signal peptide is in the carboxyl-proximal portion of the transit peptide, and contains all the information for targeting to the lumen. Recent research in proteomics of the higher plant chloroplast has achieved in the identification of numerous nuclear-encoded lumen proteins (Kieselbach et al. FEBS LETT 480:271-276, 2000; Peltier et al. Plant Cell 12:319-341, 2000; Bricker et al. Biochim. Biophys Acta 1503:350-356, 2001), the lumen targeting signal peptide of which can potentially be used in accordance with the present disclosure. About 80 proteins from Arabidopsis, as well as homologous proteins from spinach and garden pea, are reported by Kieselbach et al., Photosynthesis Research, 78:249-264, 2003. In particular, Table 2 of this publication, which is incorporated into the description herewith by reference, discloses 85 proteins from the chloroplast lumen, identified by their accession number (see also US Patent Application Publication 2009/09044298). In addition, the recently published draft version of the rice genome (Goff et al, Science 296:92-100, 2002) is a suitable source for lumen targeting signal peptide which may be used in accordance with the present disclosure.

[0248] Suitable chloroplast transit peptides (CTP) are well known to one skilled in the art also include chimeric CTPs comprising but not limited to, an N-terminal domain, a central domain or a C-terminal domain from a CTP from Oryza sativa 1-deoxy-D xyulose-5-Phosphate Synthase Oryza sativa-Superoxide dismutase Oryza sativa-soluble starch synthase Oryza sativa-NADP-dependent Malic acid enzyme Oryza sativa-Phospho-2-dehydro-3-deoxyheptonate Aldolase 2 Oryza sativa-L-Ascorbate peroxidase 5 Oryza sativa-Phosphoglucan water dikinase, Zea Mays ssRUBISCO, Zea Mays-beta-glucosidase, Zea Mays-Malate dehydrogenase, Zea Mays Thioredoxin M-type US Patent Application Publication 2012/0304336).

[0249] The PtIP-83 polypeptide gene to be targeted to the chloroplast may be optimized for expression in the chloroplast to account for differences in codon usage between the plant nucleus and this organelle. In this manner, the nucleic acids of interest may be synthesized using chloroplast-preferred codons. See, for example, U.S. Pat. No. 5,380,831, herein incorporated by reference.

[0250] In preparing the expression cassette, the various DNA fragments may be manipulated so as to provide for the DNA sequences in the proper orientation and, as appropriate, in the proper reading frame. Toward this end, adapters or linkers may be employed to join the DNA fragments or other manipulations may be involved to provide for convenient restriction sites, removal of superfluous DNA, removal of restriction sites or the like. For this purpose, in vitro mutagenesis, primer repair, restriction, annealing, resubstitutions, e.g., transitions and transversions, may be involved.

[0251] A number of promoters can be used in the practice of the embodiments. The promoters can be selected based on the desired outcome. The nucleic acids can be combined with constitutive, tissue-preferred, inducible or other promoters for expression in the host organism. Suitable constitutive promoters for use in a plant host cell include, for example, the core promoter of the Rsyn7 promoter and other constitutive promoters disclosed in WO 1999/43838 and U.S. Pat. No. 6,072,050; the core CaMV 35S promoter (Odell, et al., (1985) Nature 313:810-812); rice actin (McElroy, et al., (1990) Plant Cell 2:163-171); ubiquitin (Christensen, et al., (1989) Plant Mol. Biol. 12:619-632 and Christensen, et al., (1992) Plant Mol. Biol. 18:675-689); ubiquitin 10 promoter (Grefen, C. et al. (2010) The Plant Journal 64, 355-365); pEMU (Last, et al., (1991) Theor. Appl. Genet. 81:581-588); MAS (Velten, et al., (1984) EMBO J. 3:2723-2730); ALS promoter (U.S. Pat. No. 5,659,026) and the like. Other constitutive promoters include, for example, those discussed in U.S. Pat. Nos. 5,608,149; 5,608,144; 5,604,121; 5,569,597; 5,466,785; 5,399,680; 5,268,463; 5,608,142 and 6,177,611.

[0252] Depending on the desired outcome, it may be beneficial to express the gene from an inducible promoter. Of particular interest for regulating the expression of the nucleotide sequences of the embodiments in plants are wound-inducible promoters. Such wound-inducible promoters, may respond to damage caused by insect feeding, and include potato proteinase inhibitor (pin II) gene (Ryan, (1990) Ann. Rev. Phytopath. 28:425-449; Duan, et al., (1996) Nature Biotechnology 14:494-498); wun1 and wun2, U.S. Pat. No. 5,428,148; win1 and win2 (Stanford, et al., (1989) Mol. Gen. Genet. 215:200-208); systemin (McGurl, et al., (1992) Science 225:1570-1573); WIP1 (Rohmeier, et al., (1993) Plant Mol. Biol. 22:783-792; Eckelkamp, et al., (1993) FEBS Letters 323:73-76); MPI gene (Corderok, et al., (1994) Plant J. 6(2):141-150) and the like, herein incorporated by reference.

[0253] Additionally, pathogen-inducible promoters may be employed in the methods and nucleotide constructs of the embodiments. Such pathogen-inducible promoters include those from pathogenesis-related proteins (PR proteins), which are induced following infection by a pathogen; e.g., PR proteins, SAR proteins, beta-1,3-glucanase, chitinase, etc. See, for example, Redolfi, et al., (1983) Neth. J. Plant Pathol. 89:245-254; Uknes, et al., (1992) Plant Cell 4: 645-656 and Van Loon, (1985) Plant Mol. Virol. 4:111-116. See also, WO 1999/43819, herein incorporated by reference.

[0254] Of interest are promoters that are expressed locally at or near the site of pathogen infection. See, for example, Marineau, et al., (1987) Plant Mol. Biol. 9:335-342; Matton, et al., (1989) Molecular Plant-Microbe Interactions 2:325-331; Somsisch, et al., (1986) Proc. Natl. Acad. Sci. USA 83:2427-2430; Somsisch, et al., (1988) Mol. Gen. Genet. 2:93-98 and Yang, (1996) Proc. Natl. Acad. Sci. USA 93:14972-14977. See also, Chen, et al., (1996) Plant J. 10:955-966; Zhang, et al., (1994) Proc. Natl. Acad. Sci. USA 91:2507-2511; Warner, et al., (1993) Plant J. 3:191-201; Siebertz, et al., (1989) Plant Cell 1:961-968; U.S. Pat. No. 5,750,386 (nematode-inducible) and the references cited therein. Of particular interest is the inducible promoter for the maize PRms gene, whose expression is induced by the pathogen Fusarium moniliforme (see, for example, Cordero, et al., (1992) Physiol. Mol. Plant Path. 41:189-200).

[0255] Chemical-regulated promoters can be used to modulate the expression of a gene in a plant through the application of an exogenous chemical regulator. Depending upon the objective, the promoter may be a chemical-inducible promoter, where application of the chemical induces gene expression or a chemical-repressible promoter, where application of the chemical represses gene expression. Chemical-inducible promoters are known in the art and include, but are not limited to, the maize In2-2 promoter, which is activated by benzenesulfonamide herbicide safeners, the maize GST promoter, which is activated by hydrophobic electrophilic compounds that are used as pre-emergent herbicides, and the tobacco PR-1a promoter, which is activated by salicylic acid. Other chemical-regulated promoters of interest include steroid-responsive promoters (see, for example, the glucocorticoid-inducible promoter in Schena, et al., (1991) Proc. Natl. Acad. Sci. USA 88:10421-10425 and McNellis, et al., (1998) Plant J. 14(2):247-257) and tetracycline-inducible and tetracycline-repressible promoters (see, for example, Gatz, et al., (1991) Mol. Gen. Genet. 227:229-237 and U.S. Pat. Nos. 5,814,618 and 5,789,156), herein incorporated by reference.

[0256] Tissue-preferred promoters can be utilized to target enhanced PtIP-83 polypeptide expression within a particular plant tissue. Tissue-preferred promoters include those discussed in Yamamoto, et al., (1997) Plant J. 12(2)255-265; Kawamata, et al., (1997) Plant Cell Physiol. 38(7):792-803; Hansen, et al., (1997) Mol. Gen Genet. 254(3):337-343; Russell, et al., (1997) Transgenic Res. 6(2):157-168; Rinehart, et al., (1996) Plant Physiol. 112(3):1331-1341; Van Camp, et al., (1996) Plant Physiol. 112(2):525-535; Canevascini, et al., (1996) Plant Physiol. 112(2):513-524; Yamamoto, et al., (1994) Plant Cell Physiol. 35(5):773-778; Lam, (1994) Results Probl. Cell Differ. 20:181-196; Orozco, et al., (1993) Plant Mol Biol. 23(6):1129-1138; Matsuoka, et al., (1993) Proc Natl. Acad. Sci. USA 90(20):9586-9590 and Guevara-Garcia, et al., (1993) Plant J. 4(3):495-505. Such promoters can be modified, if necessary, for weak expression. Leaf-preferred promoters are known in the art. See, for example, Yamamoto, et al., (1997) Plant J. 12(2):255-265; Kwon, et al., (1994) Plant Physiol. 105:357-67; Yamamoto, et al., (1994) Plant Cell Physiol. 35(5):773-778; Gotor, et al., (1993) Plant J. 3:509-18; Orozco, et al., (1993) Plant Mol. Biol. 23(6):1129-1138 and Matsuoka, et al., (1993) Proc. Natl. Acad. Sci. USA 90(20):9586-9590.

[0257] Root-preferred or root-specific promoters are known and can be selected from the many available from the literature or isolated de novo from various compatible species. See, for example, Hire, et al., (1992) Plant Mol. Biol. 20(2):207-218 (soybean root-specific glutamine synthetase gene); Keller and Baumgartner, (1991) Plant Cell 3(10):1051-1061 (root-specific control element in the GRP 1.8 gene of French bean); Sanger, et al., (1990) Plant Mol. Biol. 14(3):433-443 (root-specific promoter of the mannopine synthase (MAS) gene of Agrobacterium tumefaciens) and Miao, et al., (1991) Plant Cell 3(1):11-22 (full-length cDNA clone encoding cytosolic glutamine synthetase (GS), which is expressed in roots and root nodules of soybean). See also, Bogusz, et al., (1990) Plant Cell 2(7):633-641, where two root-specific promoters isolated from hemoglobin genes from the nitrogen-fixing nonlegume Parasponia andersonii and the related non-nitrogen-fixing nonlegume Trema tomentosa are described. The promoters of these genes were linked to a β-glucuronidase reporter gene and introduced into both the nonlegume Nicotiana tabacum and the legume Lotus corniculatus, and in both instances root-specific promoter activity was preserved. Leach and Aoyagi, (1991) describe their analysis of the promoters of the highly expressed roIC and rolD root-inducing genes of Agrobacterium rhizogenes (see, Plant Science (Limerick) 79(1):69-76). They concluded that enhancer and tissue-preferred DNA determinants are dissociated in those promoters. Teeri, et al., (1989) used gene fusion to lacZ to show that the Agrobacterium T-DNA gene encoding octopine synthase is especially active in the epidermis of the root tip and that the TR2′ gene is root specific in the intact plant and stimulated by wounding in leaf tissue, an especially desirable combination of characteristics for use with an insecticidal or larvicidal gene (see, EMBO J. 8(2):343-350). The TR1′ gene fused to nptII (neomycin phosphotransferase II) showed similar characteristics. Additional root-preferred promoters include the VfENOD-GRP3 gene promoter (Kuster, et al., (1995) Plant Mol. Biol. 29(4):759-772) and rolB promoter (Capana, et al., (1994) Plant Mol. Biol. 25(4):681-691. See also, U.S. Pat. Nos. 5,837,876; 5,750,386; 5,633,363; 5,459,252; 5,401,836; 5,110,732 and 5,023,179. Arabidopsis thaliana root-preferred regulatory sequences are disclosed in US20130117883.

[0258] “Seed-preferred” promoters include both “seed-specific” promoters (those promoters active during seed development such as promoters of seed storage proteins) as well as “seed-germinating” promoters (those promoters active during seed germination). See, Thompson, et al., (1989) BioEssays 10:108, herein incorporated by reference. Such seed-preferred promoters include, but are not limited to, Cim1 (cytokinin-induced message); cZ19B1 (maize 19 kDa zein); and milps (myo-inositol-1-phosphate synthase) (see, U.S. Pat. No. 6,225,529, herein incorporated by reference). Gamma-zein and Glb-1 are endosperm-specific promoters. For dicots, seed-specific promoters include, but are not limited to, Kunitz trypsin inhibitor 3 (KTi3) (Jofuku and Goldberg, (1989) Plant Cell 1:1079-1093), bean β-phaseolin, napin, β-conglycinin, glycinin 1, soybean lectin, cruciferin, and the like. For monocots, seed-specific promoters include, but are not limited to, maize 15 kDa zein, 22 kDa zein, 27 kDa zein, g-zein, waxy, shrunken 1, shrunken 2, globulin 1, etc. See also, WO 2000/12733, where seed-preferred promoters from end1 and end2 genes are disclosed; herein incorporated by reference. In dicots, seed specific promoters include but are not limited to seed coat promoter from Arabidopsis, pBAN; and the early seed promoters from Arabidopsis, p26, p63, and p63tr (U.S. Pat. Nos. 7,294,760 and 7,847,153). A promoter that has “preferred” expression in a particular tissue is expressed in that tissue to a greater degree than in at least one other plant tissue. Some tissue-preferred promoters show expression almost exclusively in the particular tissue.

[0259] Where low level expression is desired, weak promoters will be used. Generally, the term “weak promoter” as used herein refers to a promoter that drives expression of a coding sequence at a low level. By low level expression at levels of between about 1/1000 transcripts to about 1/100,000 transcripts to about 1/500,000 transcripts is intended. Alternatively, it is recognized that the term “weak promoters” also encompasses promoters that drive expression in only a few cells and not in others to give a total low level of expression. Where a promoter drives expression at unacceptably high levels, portions of the promoter sequence can be deleted or modified to decrease expression levels.

[0260] Such weak constitutive promoters include, for example the core promoter of the Rsyn7 promoter (WO 1999/43838 and U.S. Pat. No. 6,072,050), the core 35S CaMV promoter, and the like. Other constitutive promoters include, for example, those disclosed in U.S. Pat. Nos. 5,608,149; 5,608,144; 5,604,121; 5,569,597; 5,466,785; 5,399,680; 5,268,463; 5,608,142 and 6,177,611, herein incorporated by reference.

[0261] The above list of promoters is not meant to be limiting. Any appropriate promoter can be used in the embodiments.

[0262] Generally, the expression cassette will comprise a selectable marker gene for the selection of transformed cells. Selectable marker genes are utilized for the selection of transformed cells or tissues. Marker genes include genes encoding antibiotic resistance, such as those encoding neomycin phosphotransferase II (NEO) and hygromycin phosphotransferase (HPT), as well as genes conferring resistance to herbicidal compounds, such as glufosinate ammonium, bromoxynil, imidazolinones and 2,4-dichlorophenoxyacetate (2,4-D). Additional examples of suitable selectable marker genes include, but are not limited to, genes encoding resistance to chloramphenicol (Herrera Estrella, et al., (1983) EMBO J. 2:987-992); methotrexate (Herrera Estrella, et al., (1983) Nature 303:209-213 and Meijer, et al., (1991) Plant Mol. Biol. 16:807-820); streptomycin (Jones, et al., (1987) Mol. Gen. Genet. 210:86-91); spectinomycin (Bretagne-Sagnard, et al., (1996) Transgenic Res. 5:131-137); bleomycin (Hille, et al., (1990) Plant Mol. Biol. 7:171-176); sulfonamide (Guerineau, et al., (1990) Plant Mol. Biol. 15:127-136); bromoxynil (Stalker, et al., (1988) Science 242:419-423); glyphosate (Shaw, et al., (1986) Science 233:478-481 and U.S. patent application Ser. Nos. 10/004,357 and 10/427,692); phosphinothricin (DeBlock, et al., (1987) EMBO J. 6:2513-2518). See generally, Yarranton, (1992) Curr. Opin. Biotech. 3:506-511; Christopherson, et al., (1992) Proc. Natl. Acad. Sci. USA 89:6314-6318; Yao, et al., (1992) Cell 71:63-72; Reznikoff, (1992) Mol. Microbiol. 6:2419-2422; Barkley, et al., (1980) in The Operon, pp. 177-220; Hu, et al., (1987) Cell 48:555-566; Brown, et al., (1987) Cell 49:603-612; Figge, et al., (1988) Cell 52:713-722; Deuschle, et al., (1989) Proc. Natl. Acad. Sci. USA 86:5400-5404; Fuerst, et al., (1989) Proc. Natl. Acad. Sci. USA 86:2549-2553; Deuschle, et al., (1990) Science 248:480-483; Gossen, (1993) Ph.D. Thesis, University of Heidelberg; Reines, et al., (1993) Proc. Natl. Acad. Sci. USA 90:1917-1921; Labow, et al., (1990) Mol. Cell. Biol. 10:3343-3356; Zambretti, et al., (1992) Proc. Natl. Acad. Sci. USA 89:3952-3956; Baim, et al., (1991) Proc. Natl. Acad. Sci. USA 88:5072-5076; Wyborski, et al., (1991) Nucleic Acids Res. 19:4647-4653; Hillenand-Wissman, (1989) Topics Mol. Struc. Biol. 10:143-162; Degenkolb, et al., (1991) Antimicrob. Agents Chemother. 35:1591-1595; Kleinschnidt, et al., (1988) Biochemistry 27:1094-1104; Bonin, (1993) Ph.D. Thesis, University of Heidelberg; Gossen, et al., (1992) Proc. Natl. Acad. Sci. USA 89:5547-5551; Oliva, et al., (1992) Antimicrob. Agents Chemother. 36:913-919; Hlavka, et al., (1985) Handbook of Experimental Pharmacology, Vol. 78 (Springer-Verlag, Berlin) and Gill, et al., (1988) Nature 334:721-724. Such disclosures are herein incorporated by reference.

[0263] The above list of selectable marker genes is not meant to be limiting. Any selectable marker gene can be used in the embodiments.

### Plant Transformation

[0264] The methods of the embodiments involve introducing a polypeptide or polynucleotide into a plant. “Introducing” is as used herein means presenting to the plant the polynucleotide or polypeptide in such a manner that the sequence gains access to the interior of a cell of the plant. The methods of the embodiments do not depend on a particular method for introducing a polynucleotide or polypeptide into a plant, only that the polynucleotide or polypeptides gains access to the interior of at least one cell of the plant. Methods for introducing polynucleotide or polypeptides into plants are known in the art including, but not limited to, stable transformation methods, transient transformation methods, and virus-mediated methods.

[0265] “Stable transformation” is as used herein means that the nucleotide construct introduced into a plant integrates into the genome of the plant and is capable of being inherited by the progeny thereof. “Transient transformation” as used herein means that a polynucleotide is introduced into the plant and does not integrate into the genome of the plant or a polypeptide is introduced into a plant. “Plant” as used herein refers to whole plants, plant organs (e.g., leaves, stems, roots, etc.), seeds, plant cells, propagules, embryos and progeny of the same. Plant cells can be differentiated or undifferentiated (e.g. callus, suspension culture cells, protoplasts, leaf cells, root cells, phloem cells and pollen).

[0266] Transformation protocols as well as protocols for introducing nucleotide sequences into plants may vary depending on the type of plant or plant cell, i.e., monocot or dicot, targeted for transformation. Suitable methods of introducing nucleotide sequences into plant cells and subsequent insertion into the plant genome include microinjection (Crossway, et al., (1986) Biotechniques 4:320-334), electroporation (Riggs, et al., (1986) Proc. Natl. Acad. Sci. USA 83:5602-5606), Agrobacterium-mediated transformation (U.S. Pat. Nos. 5,563,055 and 5,981,840), direct gene transfer (Paszkowski, et al., (1984) EMBO J. 3:2717-2722) and ballistic particle acceleration (see, for example, U.S. Pat. Nos. 4,945,050; 5,879,918; 5,886,244 and 5,932,782; Tomes, et al., (1995) in Plant Cell, Tissue, and Organ Culture: Fundamental Methods, ed. Gamborg and Phillips, (Springer-Verlag, Berlin) and McCabe, et al., (1988) Biotechnology 6:923-926) and LecI transformation (WO 00/28058). For potato transformation see, Tu, et al., (1998) Plant Molecular Biology 37:829-838 and Chong, et al., (2000) Transgenic Research 9:71-78. Additional transformation procedures can be found in Weissinger, et al., (1988) Ann. Rev. Genet. 22:421-477; Sanford, et al., (1987) Particulate Science and Technology 5:27-37 (onion); Christou, et al., (1988) Plant Physiol. 87:671-674 (soybean); McCabe, et al., (1988) Bio/Technology 6:923-926 (soybean); Finer and McMullen, (1991) In Vitro Cell Dev. Biol. 27P:175-182 (soybean); Singh, et al., (1998) Theor. Appl. Genet. 96:319-324 (soybean); Datta, et al., (1990) Biotechnology 8:736-740 (rice); Klein, et al., (1988) Proc. Natl. Acad. Sci. USA 85:4305-4309 (maize); Klein, et al., (1988) Biotechnology 6:559-563 (maize); U.S. Pat. Nos. 5,240,855; 5,322,783 and 5,324,646; Klein, et al., (1988) Plant Physiol. 91:440-444 (maize); Fromm, et al., (1990) Biotechnology 8:833-839 (maize); Hooykaas-Van Slogteren, et al., (1984) Nature (London) 311:763-764; U.S. Pat. No. 5,736,369 (cereals); Bytebier, et al., (1987) Proc. Natl. Acad. Sci. USA 84:5345-5349 (Liliaceae); De Wet, et al., (1985) in The Experimental Manipulation of Ovule Tissues, ed. Chapman, et al., (Longman, New York), pp. 197-209 (pollen); Kaeppler, et al., (1990) Plant Cell Reports 9:415-418 and Kaeppler, et al., (1992) Theor. Appl. Genet. 84:560-566 (whisker-mediated transformation); D'Halluin, et al., (1992) Plant Cell 4:1495-1505 (electroporation); Li, et al., (1993) Plant Cell Reports 12:250-255 and Christou and Ford, (1995) Annals of Botany 75:407-413 (rice); Osjoda, et al., (1996) Nature Biotechnology 14:745-750 (maize via Agrobacterium tumefaciens); all of which are herein incorporated by reference.

[0267] In specific embodiments, the sequences of the embodiments can be provided to a plant using a variety of transient transformation methods. Such transient transformation methods include, but are not limited to, the introduction of the PtIP-83 polynucleotide or variants and fragments thereof directly into the plant or the introduction of the PtIP-83 polypeptide transcript into the plant. Such methods include, for example, microinjection or particle bombardment. See, for example, Crossway, et al., (1986) Mol Gen. Genet. 202:179-185; Nomura, et al., (1986) Plant Sci. 44:53-58; Hepler, et al., (1994) Proc. Natl. Acad. Sci. 91:2176-2180 and Hush, et al., (1994) The Journal of Cell Science 107:775-784, all of which are herein incorporated by reference. Alternatively, the PtIP-83 polypeptide polynucleotide can be transiently transformed into the plant using techniques known in the art. Such techniques include viral vector system and the precipitation of the polynucleotide in a manner that precludes subsequent release of the DNA. Thus, transcription from the particle-bound DNA can occur, but the frequency with which it is released to become integrated into the genome is greatly reduced. Such methods include the use of particles coated with polyethylimine (PEI; Sigma #P3143).

[0268] Methods are known in the art for the targeted insertion of a polynucleotide at a specific location in the plant genome. In one embodiment, the insertion of the polynucleotide at a desired genomic location is achieved using a site-specific recombination system. See, for example, WO 1999/25821, WO 1999/25854, WO 1999/25840, WO 1999/25855 and WO 1999/25853, all of which are herein incorporated by reference. Briefly, the polynucleotide of the embodiments can be contained in transfer cassette flanked by two non-identical recombination sites. The transfer cassette is introduced into a plant have stably incorporated into its genome a target site which is flanked by two non-identical recombination sites that correspond to the sites of the transfer cassette. An appropriate recombinase is provided and the transfer cassette is integrated at the target site. The polynucleotide of interest is thereby integrated at a specific chromosomal position in the plant genome.

[0269] Plant transformation vectors may be comprised of one or more DNA vectors needed for achieving plant transformation. For example, it is a common practice in the art to utilize plant transformation vectors that are comprised of more than one contiguous DNA segment. These vectors are often referred to in the art as “binary vectors”. Binary vectors as well as vectors with helper plasmids are most often used for Agrobacterium-mediated transformation, where the size and complexity of DNA segments needed to achieve efficient transformation is quite large, and it is advantageous to separate functions onto separate DNA molecules. Binary vectors typically contain a plasmid vector that contains the cis-acting sequences required for T-DNA transfer (such as left border and right border), a selectable marker that is engineered to be capable of expression in a plant cell, and a “gene of interest” (a gene engineered to be capable of expression in a plant cell for which generation of transgenic plants is desired). Also present on this plasmid vector are sequences required for bacterial replication. The cis-acting sequences are arranged in a fashion to allow efficient transfer into plant cells and expression therein. For example, the selectable marker gene and the pesticidal gene are located between the left and right borders. Often a second plasmid vector contains the trans-acting factors that mediate T-DNA transfer from Agrobacterium to plant cells. This plasmid often contains the virulence functions (Vir genes) that allow infection of plant cells by Agrobacterium, and transfer of DNA by cleavage at border sequences and vir-mediated DNA transfer, as is understood in the art (Hellens and Mullineaux, (2000) Trends in Plant Science 5:446-451). Several types of Agrobacterium strains (e.g. LBA4404, GV3101, EHA101, EHA105, etc.) can be used for plant transformation. The second plasmid vector is not necessary for transforming the plants by other methods such as microprojection, microinjection, electroporation, polyethylene glycol, etc.

[0270] In general, plant transformation methods involve transferring heterologous DNA into target plant cells (e.g., immature or mature embryos, suspension cultures, undifferentiated callus, protoplasts, etc.), followed by applying a maximum threshold level of appropriate selection (depending on the selectable marker gene) to recover the transformed plant cells from a group of untransformed cell mass. Following integration of heterologous foreign DNA into plant cells, one then applies a maximum threshold level of appropriate selection in the medium to kill the untransformed cells and separate and proliferate the putatively transformed cells that survive from this selection treatment by transferring regularly to a fresh medium. By continuous passage and challenge with appropriate selection, one identifies and proliferates the cells that are transformed with the plasmid vector. Molecular and biochemical methods can then be used to confirm the presence of the integrated heterologous gene of interest into the genome of the transgenic plant.

[0271] Explants are typically transferred to a fresh supply of the same medium and cultured routinely. Subsequently, the transformed cells are differentiated into shoots after placing on regeneration medium supplemented with a maximum threshold level of selecting agent. The shoots are then transferred to a selective rooting medium for recovering rooted shoot or plantlet. The transgenic plantlet then grows into a mature plant and produces fertile seeds (e.g., Hiei, et al., (1994) The Plant Journal 6:271-282; Ishida, et al., (1996) Nature Biotechnology 14:745-750). Explants are typically transferred to a fresh supply of the same medium and cultured routinely. A general description of the techniques and methods for generating transgenic plants are found in Ayres and Park, (1994) Critical Reviews in Plant Science 13:219-239 and Bommineni and Jauhar, (1997) Maydica 42:107-120. Since the transformed material contains many cells; both transformed and non-transformed cells are present in any piece of subjected target callus or tissue or group of cells. The ability to kill non-transformed cells and allow transformed cells to proliferate results in transformed plant cultures. Often, the ability to remove non-transformed cells is a limitation to rapid recovery of transformed plant cells and successful generation of transgenic plants.

[0272] The cells that have been transformed may be grown into plants in accordance with conventional ways. See, for example, McCormick, et al., (1986) Plant Cell Reports 5:81-84. These plants may then be grown, and either pollinated with the same transformed strain or different strains, and the resulting hybrid having constitutive or inducible expression of the desired phenotypic characteristic identified. Two or more generations may be grown to ensure that expression of the desired phenotypic characteristic is stably maintained and inherited and then seeds harvested to ensure that expression of the desired phenotypic characteristic has been achieved.

[0273] The nucleotide sequences of the embodiments may be provided to the plant by contacting the plant with a virus or viral nucleic acids. Generally, such methods involve incorporating the nucleotide construct of interest within a viral DNA or RNA molecule. It is recognized that the recombinant proteins of the embodiments may be initially synthesized as part of a viral polyprotein, which later may be processed by proteolysis in vivo or in vitro to produce the desired PtIP-83 polypeptide. It is also recognized that such a viral polyprotein, comprising at least a portion of the amino acid sequence of a PtIP-83 of the embodiments, may have the desired pesticidal activity. Such viral polyproteins and the nucleotide sequences that encode for them are encompassed by the embodiments. Methods for providing plants with nucleotide constructs and producing the encoded proteins in the plants, which involve viral DNA or RNA molecules are known in the art. See, for example, U.S. Pat. Nos. 5,889,191; 5,889,190; 5,866,785; 5,589,367 and 5,316,931; herein incorporated by reference.

[0274] Methods for transformation of chloroplasts are known in the art. See, for example, Svab, et al., (1990) Proc. Natl. Acad. Sci. USA 87:8526-8530; Svab and Maliga, (1993) Proc. Natl. Acad. Sci. USA 90:913-917; Svab and Maliga, (1993) EMBO J. 12:601-606. The method relies on particle gun delivery of DNA containing a selectable marker and targeting of the DNA to the plastid genome through homologous recombination. Additionally, plastid transformation can be accomplished by transactivation of a silent plastid-borne transgene by tissue-preferred expression of a nuclear-encoded and plastid-directed RNA polymerase. Such a system has been reported in McBride, et al., (1994) Proc. Natl. Acad. Sci. USA 91:7301-7305.

[0275] The embodiments further relate to plant-propagating material of a transformed plant of the embodiments including, but not limited to, seeds, tubers, corms, bulbs, leaves and cuttings of roots and shoots.

[0276] The embodiments may be used for transformation of any plant species, including, but not limited to, monocots and dicots. Examples of plants of interest include, but are not limited to, corn (Zea mays), Brassica sp. (e.g., B. napus, B. rapa, B. juncea), particularly those Brassica species useful as sources of seed oil, alfalfa (Medicago sativa), rice (Olyza sativa), rye (Secale cereale), sorghum (Sorghum bicolor, Sorghum vulgare), millet (e.g., pearl millet (Pennisetum glaucum), proso millet (Panicum miliaceum), foxtail millet (Setaria italica), finger millet (Eleusine coracana)), sunflower (Helianthus annuus), safflower (Carthamus tinctorius), wheat (Triticum aestivum), soybean (Glycine max), tobacco (Nicotiana tabacum), potato (Solanum tuberosum), peanuts (Arachis hypogaea), cotton (Gossypium barbadense, Gossypium hirsutum), sweet potato (Ipomoea batatus), cassava (Manihot esculenta), coffee (Coffea spp.), coconut (Cocos nucifera), pineapple (Ananas comosus), citrus trees (Citrus spp.), cocoa (Theobroma cacao), tea (Camellia sinensis), banana (Musa spp.), avocado (Persea americana), fig (Ficus casica), guava (Psidium guajava), mango (Mangifera indica), olive (Olea europaea), papaya (Carica papaya), cashew (Anacardium occidentale), macadamia (Macadamia integrifolia), almond (Prunus amygdalus), sugar beets (Beta vulgaris), sugarcane (Saccharum spp.), oats, barley, vegetables ornamentals, and conifers.

[0277] Vegetables include tomatoes (Lycopersicon esculentum), lettuce (e.g., Lactuca sativa), green beans (Phaseolus vulgaris), lima beans (Phaseolus limensis), peas (Lathyrus spp.), and members of the genus Cucumis such as cucumber (C. sativus), cantaloupe (C. cantalupensis), and musk melon (C. melo). Ornamentals include azalea (Rhododendron spp.), hydrangea (Macrophylla hydrangea), hibiscus (Hibiscus rosasanensis), roses (Rosa spp.), tulips (Tulipa spp.), daffodils (Narcissus spp.), petunias (Petunia hybrida), carnation (Dianthus caryophyllus), poinsettia (Euphorbia pulcherrima), and chrysanthemum. Conifers that may be employed in practicing the embodiments include, for example, pines such as loblolly pine (Pinus taeda), slash pine (Pinus elliotii), ponderosa pine (Pinus ponderosa), lodgepole pine (Pinus contorta), and Monterey pine (Pinus radiata); Douglas-fir (Pseudotsuga menziesii); Western hemlock (Tsuga canadensis); Sitka spruce (Picea glauca); redwood (Sequoia sempervirens); true firs such as silver fir (Abies amabilis) and balsam fir (Abies balsamea); and cedars such as Western red cedar (Thuja plicata) and Alaska yellow-cedar (Chamaecyparis nootkatensis). Plants of the embodiments include crop plants (for example, corn, alfalfa, sunflower, Brassica, soybean, cotton, safflower, peanut, sorghum, wheat, millet, tobacco, etc.), such as corn and soybean plants.

[0278] Turf grasses include, but are not limited to: annual bluegrass (Poa annua); annual ryegrass (Lolium multiflorum); Canada bluegrass (Poa compressa); Chewing's fescue (Festuca rubra); colonial bentgrass (Agrostis tenuis); creeping bentgrass (Agrostis palustris); crested wheatgrass (Agropyron desertorum); fairway wheatgrass (Agropyron cristatum); hard fescue (Festuca longifolia); Kentucky bluegrass (Poa pratensis); orchardgrass (Dactylis glomerata); perennial ryegrass (Lolium perenne); red fescue (Festuca rubra); redtop (Agrostis alba); rough bluegrass (Poa trivialis); sheep fescue (Festuca ovina); smooth bromegrass (Bromus inermis); tall fescue (Festuca arundinacea); timothy (Phleum pratense); velvet bentgrass (Agrostis canina); weeping alkaligrass (Puccinellia distans); western wheatgrass (Agropyron smithii); Bermuda grass (Cynodon spp.); St. Augustine grass (Stenotaphrum secundatum); zoysia grass (Zoysia spp.); Bahia grass (Paspalum notatum); carpet grass (Axonopus affinis); centipede grass (Eremochloa ophiuroides); kikuyu grass (Pennisetum clandesinum); seashore paspalum (Paspalum vaginatum); blue gramma (Bouteloua gracilis); buffalo grass (Buchloe dactyloids); sideoats gramma (Bouteloua curtipendula).

[0279] Plants of interest include grain plants that provide seeds of interest, oil-seed plants, and leguminous plants. Seeds of interest include grain seeds, such as corn, wheat, barley, rice, sorghum, rye, millet, etc. Oil-seed plants include cotton, soybean, safflower, sunflower, Brassica, maize, alfalfa, palm, coconut, flax, castor, olive, etc. Leguminous plants include beans and peas. Beans include guar, locust bean, fenugreek, soybean, garden beans, cowpea, mungbean, lima bean, fava bean, lentils, chickpea, etc.

### Evaluation of Plant Transformation

[0280] Following introduction of heterologous foreign DNA into plant cells, the transformation or integration of heterologous gene in the plant genome is confirmed by various methods such as analysis of nucleic acids, proteins and metabolites associated with the integrated gene. PCR analysis is a rapid method to screen transformed cells, tissue or shoots for the presence of incorporated gene at the earlier stage before transplanting into the soil (Sambrook and Russell, (2001) Molecular Cloning: A Laboratory Manual. Cold Spring Harbor Laboratory Press, Cold Spring Harbor, N.Y.). PCR is carried out using oligonucleotide primers specific to the gene of interest or Agrobacterium vector background, etc.

[0281] Plant transformation may be confirmed by Southern blot analysis of genomic DNA (Sambrook and Russell, (2001) supra). In general, total DNA is extracted from the transformant, digested with appropriate restriction enzymes, fractionated in an agarose gel and transferred to a nitrocellulose or nylon membrane. The membrane or “blot” is then probed with, for example, radiolabeled 32P target DNA fragment to confirm the integration of introduced gene into the plant genome according to standard techniques (Sambrook and Russell, (2001) supra).

[0282] In Northern blot analysis, RNA is isolated from specific tissues of transformant, fractionated in a formaldehyde agarose gel, and blotted onto a nylon filter according to standard procedures that are routinely used in the art (Sambrook and Russell, (2001) supra). Expression of RNA encoded by the pesticidal gene is then tested by hybridizing the filter to a radioactive probe derived from a pesticidal gene, by methods known in the art (Sambrook and Russell, (2001) supra).

[0283] Western blot, biochemical assays and the like may be carried out on the transgenic plants to confirm the presence of protein encoded by the pesticidal gene by standard procedures (Sambrook and Russell, 2001, supra) using antibodies that bind to one or more epitopes present on the PtIP-83 polypeptide.

### Stacking of Traits in Transgenic Plant

[0284] Transgenic plants may comprise a stack of one or more insecticidal polynucleotides disclosed herein with one or more additional polynucleotides resulting in the production or suppression of multiple polypeptide sequences. Transgenic plants comprising stacks of polynucleotide sequences can be obtained by either or both of traditional breeding methods or through genetic engineering methods. These methods include, but are not limited to, breeding individual lines each comprising a polynucleotide of interest, transforming a transgenic plant comprising a gene disclosed herein with a subsequent gene and co-transformation of genes into a single plant cell. As used herein, the term “stacked” includes having the multiple traits present in the same plant (i.e., both traits are incorporated into the nuclear genome, one trait is incorporated into the nuclear genome and one trait is incorporated into the genome of a plastid or both traits are incorporated into the genome of a plastid). In one non-limiting example, “stacked traits” comprise a molecular stack where the sequences are physically adjacent to each other. A trait, as used herein, refers to the phenotype derived from a particular sequence or groups of sequences. Co-transformation of genes can be carried out using single transformation vectors comprising multiple genes or genes carried separately on multiple vectors. If the sequences are stacked by genetically transforming the plants, the polynucleotide sequences of interest can be combined at any time and in any order. The traits can be introduced simultaneously in a co-transformation protocol with the polynucleotides of interest provided by any combination of transformation cassettes. For example, if two sequences will be introduced, the two sequences can be contained in separate transformation cassettes (trans) or contained on the same transformation cassette (cis). Expression of the sequences can be driven by the same promoter or by different promoters. In certain cases, it may be desirable to introduce a transformation cassette that will suppress the expression of the polynucleotide of interest. This may be combined with any combination of other suppression cassettes or overexpression cassettes to generate the desired combination of traits in the plant. It is further recognized that polynucleotide sequences can be stacked at a desired genomic location using a site-specific recombination system. See, for example, WO 1999/25821, WO 1999/25854, WO 1999/25840, WO 1999/25855 and WO 1999/25853, all of which are herein incorporated by reference.

[0285] In some embodiments the polynucleotides encoding the PtIP-83 polypeptide disclosed herein, alone or stacked with one or more additional insect resistance traits can be stacked with one or more additional input traits (e.g., herbicide resistance, fungal resistance, virus resistance, stress tolerance, disease resistance, male sterility, stalk strength, and the like) or output traits (e.g., increased yield, modified starches, improved oil profile, balanced amino acids, high lysine or methionine, increased digestibility, improved fiber quality, drought resistance, and the like). Thus, the polynucleotide embodiments can be used to provide a complete agronomic package of improved crop quality with the ability to flexibly and cost effectively control any number of agronomic pests.

### Transgenes Useful for Stacking Include but are not Limited to:

[0286] 1. Transgenes that Confer Resistance to Insects or Disease and that Encode:
[0287] (A) Plant disease resistance genes. Plant defenses are often activated by specific interaction between the product of a disease resistance gene (R) in the plant and the product of a corresponding avirulence (Avr) gene in the pathogen. A plant variety can be transformed with cloned resistance gene to engineer plants that are resistant to specific pathogen strains. See, for example, Jones, et al., (1994) Science 266:789 (cloning of the tomato Cf-9 gene for resistance to Cladosporium fulvum); Martin, et al., (1993) Science 262:1432 (tomato Pto gene for resistance to Pseudomonas syringae pv. tomato encodes a protein kinase); Mindrinos, et al., (1994) Cell 78:1089 (Arabidopsis RSP2 gene for resistance to Pseudomonas syringae), McDowell and Woffenden, (2003) Trends Biotechnol. 21(4):178-83 and Toyoda, et al., (2002) Transgenic Res. 11(6):567-82. A plant resistant to a disease is one that is more resistant to a pathogen as compared to the wild type plant.
[0288] (B) Genes encoding a Bacillus thuringiensis protein, a derivative thereof or a synthetic polypeptide modeled thereon. See, for example, Geiser, et al., (1986) Gene 48:109, who disclose the cloning and nucleotide sequence of a Bt delta-endotoxin gene. Moreover, DNA molecules encoding delta-endotoxin genes can be purchased from American Type Culture Collection (Rockville, Md.), for example, under ATCC® Accession Numbers 40098, 67136, 31995 and 31998. Other non-limiting examples of Bacillus thuringiensis transgenes being genetically engineered are given in the following patents and patent applications and hereby are incorporated by reference for this purpose: U.S. Pat. Nos. 5,188,960; 5,689,052; 5,880,275; 5,986,177; 6,023,013, 6,060,594, 6,063,597, 6,077,824, 6,620,988, 6,642,030, 6,713,259, 6,893,826, 7,105,332; 7,179,965, 7,208,474; 7,227,056, 7,288,643, 7,323,556, 7,329,736, 7,449,552, 7,468,278, 7,510,878, 7,521,235, 7,544,862, 7,605,304, 7,696,412, 7,629,504, 7,705,216, 7,772,465, 7,790,846, 7,858,849 and WO 1991/14778; WO 1999/31248; WO 2001/12731; WO 1999/24581 and WO 1997/40162.
[0289] Genes encoding pesticidal proteins may also be stacked including but are not limited to: insecticidal proteins from Pseudomonas sp. such as PSEEN3174 (Monalysin, (2011) PLoS Pathogens, 7:1-13), from Pseudomonas protegens strain CHA0 and Pf-5 (previously fluorescens) (Pechy-Tarr, (2008) Environmental Microbiology 10:2368-2386: GenBank Accession No. EU400157); from Pseudomonas Taiwanensis (Liu, et al., (2010) J. Agric. Food Chem. 58:12343-12349) and from Pseudomonas pseudoalcligenes (Zhang, et al., (2009) Annals of Microbiology 59:45-50 and Li, et al., (2007) Plant Cell Tiss. Organ Cult. 89:159-168); insecticidal proteins from Photorhabdus sp. and Xenorhabdus sp. (Hinchliffe, et al., (2010) The Open Toxinology Journal 3:101-118 and Morgan, et al., (2001) Applied and Envir. Micro. 67:2062-2069), U.S. Pat. Nos. 6,048,838, and 6,379,946; a PIP-1 polypeptide of US Patent Publication US20140007292 ; an AflP-1A and/or AflP-1B polypeptide of US Patent Publication US20140033361; a PHI-4 polypeptide of US patent Publication US20140274885 or PCT Patent Publication WO2014/150914; a PIP-47 polypeptide of PCT Serial Number PCT/US14/51063, a PIP-72 polypeptide of PCT Serial Number PCT/US14/55128, and δ-endotoxins including, but not limited to, the Cry1, Cry2, Cry3, Cry4, Cry5, Cry6, Cry7, Cry8, Cry9, Cry10, Cry11, Cry12, Cry13, Cry14, Cry15, Cry16, Cry17, Cry18, Cry19, Cry20, Cry21, Cry22, Cry23, Cry24, Cry25, Cry26, Cry27, Cry 28, Cry 29, Cry 30, Cry31, Cry32, Cry33, Cry34, Cry35,Cry36, Cry37, Cry38, Cry39, Cry40, Cry41, Cry42, Cry43, Cry44, Cry45, Cry 46, Cry47, Cry49, Cry50, Cry51, Cry52, Cry53, Cry 54, Cry55, Cry56, Cry57, Cry58, Cry59, Cry60, Cry61, Cry62, Cry63, Cry64, Cry65, Cry66, Cry67, Cry68, Cry69, Cry70, Cry71, and Cry 72 classes of δ-endotoxin genes and the B. thuringiensis cytolytic Cyt1 and Cyt2 genes. Members of these classes of B. thuringiensis insecticidal proteins include, but are not limited to Cry1Aa1 (Accession #AAA22353); Cry1Aa2 (Accession # Accession #AAA22552); Cry1Aa3 (Accession #BAA00257); Cry1Aa4 (Accession #CAA31886); Cry1Aa5 (Accession #BAA04468); Cry1Aa6 (Accession #AAA86265); Cry1Aa7 (Accession #AAD46139); Cry1Aa8 (Accession #126149); Cry1Aa9 (Accession #BAA77213); Cry1Aa10 (Accession #AAD55382); Cry1Aa11 (Accession #CAA70856); Cry1Aa12 (Accession #AAP80146); Cry1Aa13 (Accession #AAM44305); Cry1Aa14 (Accession #AAP40639); Cry1Aa15 (Accession #AAY66993); Cry1Aa16 (Accession #HQ439776); Cry1Aa17 (Accession #HQ439788); Cry1Aa18 (Accession #HQ439790); Cry1Aa19 (Accession #HQ685121); Cry1Aa20 (Accession #JF340156); Cry1Aa21 (Accession #JN651496); Cry1Aa22 (Accession #KC158223); Cry1Ab1 (Accession #AAA22330); Cry1Ab2 (Accession #AAA22613); Cry1Ab3 (Accession #AAA22561); Cry1Ab4 (Accession #BAA00071); Cry1Ab5 (Accession #CAA28405); Cry1Ab6 (Accession #AAA22420); Cry1Ab7 (Accession #CAA31620); Cry1Ab8 (Accession #AAA22551); Cry1Ab9 (Accession #CAA38701); Cry1Ab10 (Accession #A29125); Cry1Ab11 (Accession #112419); Cry1Ab12 (Accession #AAC64003); Cry1Ab13 (Accession #AAN76494); Cry1Ab14 (Accession #AAG16877); Cry1Ab15 (Accession #AA013302); Cry1Ab16 (Accession #AAK55546); Cry1Ab17 (Accession #AAT46415); Cry1Ab18 (Accession #AAQ88259); Cry1Ab19 (Accession #AAW31761); Cry1Ab20 (Accession #ABB72460); Cry1Ab21 (Accession #ABS18384); Cry1Ab22 (Accession #ABW87320); Cry1Ab23 (Accession #HQ439777); Cry1Ab24 (Accession #HQ439778); Cry1Ab25 (Accession #HQ685122); Cry1Ab26 (Accession #HQ847729); Cry1Ab27 (Accession #JN135249); Cry1Ab28 (Accession #JN135250); Cry1Ab29 (Accession #JN135251); Cry1Ab30 (Accession #JN135252); Cry1Ab31 (Accession #JN135253); Cry1Ab32 (Accession #JN135254); Cry1Ab33 (Accession #AAS93798); Cry1Ab34 (Accession #KC156668); Cry1Ab-like (Accession #AAK14336); Cry1Ab-like (Accession #AAK14337); Cry1Ab-like (Accession #AAK14338); Cry1Ab-like (Accession #ABG88858); Cry1Ac1 (Accession #AAA22331); Cry1Ac2 (Accession #AAA22338); Cry1Ac3 (Accession #CAA38098); Cry1Ac4 (Accession #AAA73077); Cry1Ac5 (Accession #AAA22339); Cry1Ac6 (Accession #AAA86266); Cry1Ac7 (Accession #AAB46989); Cry1Ac8 (Accession #AAC44841); Cry1Ac9 (Accession #AAB49768); Cry1Ac10 (Accession #CAA05505); Cry1Ac11 (Accession #CAA10270); Cry1Ac12 (Accession #I12418); Cry1Ac13 (Accession #AAD38701); Cry1Ac14 (Accession #AAQ06607); Cry1Ac15 (Accession #AAN07788); Cry1Ac16 (Accession #AAU87037); Cry1Ac17 (Accession #AAX18704); Cry1Ac18 (Accession #AAY88347); Cry1Ac19 (Accession #ABD37053); Cry1Ac20 (Accession #ABB89046); Cry1Ac21 (Accession #AAY66992); Cry1Ac22 (Accession #ABZ01836); Cry1Ac23 (Accession #CAQ30431); Cry1Ac24 (Accession #ABL01535); Cry1Ac25 (Accession #FJ513324); Cry1Ac26 (Accession #FJ617446); Cry1Ac27 (Accession #FJ617447); Cry1Ac28 (Accession #ACM90319); Cry1Ac29 (Accession #DQ438941); Cry1Ac30 (Accession #GQ227507); Cry1Ac31 (Accession #GU446674); Cry1Ac32 (Accession #HM061081); Cry1Ac33 (Accession #GQ866913); Cry1Ac34 (Accession #HQ230364); Cry1Ac35 (Accession #JF340157); Cry1Ac36 (Accession #JN387137); Cry1Ac37 (Accession #JQ317685); Cry1Ad1 (Accession #AAA22340); Cry1Ad2 (Accession #CAA01880); Cry1Ae1 (Accession #AAA22410); Cry1Af1 (Accession #AAB82749); Cry1Ag1 (Accession #AAD46137); Cry1Ah1 (Accession #AAQ14326); Cry1Ah2 (Accession #ABB76664); Cry1Ah3 (Accession #HQ439779); Cry1Ai1 (Accession #AA039719); Cry1Ai2 (Accession #HQ439780); Cry1A-like (Accession #AAK14339); Cry1Ba1 (Accession #CAA29898); Cry1Ba2 (Accession #CAA65003); Cry1Ba3 (Accession #AAK63251); Cry1Ba4 (Accession #AAK51084); Cry1Ba5 (Accession #AB020894); Cry1Ba6 (Accession #ABL60921); Cry1Ba7 (Accession #HQ439781); Cry1Bb1 (Accession #AAA22344); Cry1Bb2 (Accession #HQ439782); Cry1Bc1 (Accession #CAA86568); Cry1Bd1 (Accession #AAD10292); Cry1Bd2 (Accession #AAM93496); Cry1Be1 (Accession #AAC32850); Cry1Be2 (Accession #AAQ52387); Cry1Be3 (Accession #ACV96720); Cry1Be4 (Accession #HM070026); Cry1Bf1 (Accession #CAC50778); Cry1Bf2 (Accession #AAQ52380); Cry1Bg1 (Accession #AA039720); Cry1Bh1 (Accession #HQ589331); Cry1Bi1 (Accession #KC156700); Cry1Ca1 (Accession #CAA30396); Cry1Ca2 (Accession #CAA31951); Cry1Ca3 (Accession #AAA22343); Cry1Ca4 (Accession #CAA01886); Cry1Ca5 (Accession #CAA65457); Cry1Ca6 [1] (Accession #AAF37224); Cry1Ca7 (Accession #AAG50438); Cry1Ca8 (Accession #AAM00264); Cry1Ca9 (Accession #AAL79362); Cry1Ca10 (Accession #AAN16462); Cry1Ca11 (Accession #AAX53094); Cry1Ca12 (Accession #HM070027); Cry1Ca13 (Accession #HQ412621); Cry1Ca14 (Accession #JN651493); Cry1Cb1 (Accession #M97880); Cry1Cb2 (Accession #AAG35409); Cry1Cb3 (Accession #ACD50894); Cry1Cb-like (Accession #AAX63901); Cry1Da1 (Accession #CAA38099); Cry1Da2 (Accession #176415); Cry1Da3 (Accession #HQ439784); Cry1Db1 (Accession #CAA80234); Cry1Db2 (Accession #AAK48937); Cry1Dc1 (Accession #ABK35074); Cry1Ea1 (Accession #CAA37933); Cry1Ea2 (Accession #CAA39609); Cry1Ea3 (Accession #AAA22345); Cry1Ea4 (Accession #AAD04732); Cry1Ea5 (Accession #A15535); Cry1Ea6 (Accession #AAL50330); Cry1Ea7 (Accession #AAW72936); Cry1Ea8 (Accession #ABX11258); Cry1Ea9 (Accession #HQ439785); Cry1Ea10 (Accession #ADR00398); Cry1Ea11 (Accession #JQ652456); Cry1Eb1 (Accession #AAA22346); Cry1Fa1 (Accession #AAA22348); Cry1Fa2 (Accession #AAA22347); Cry1Fa3 (Accession #HM070028); Cry1Fa4 (Accession #HM439638); Cry1Fb1 (Accession #CAA80235); Cry1Fb2 (Accession #BAA25298); Cry1Fb3 (Accession #AAF21767); Cry1Fb4 (Accession #AAC10641); Cry1Fb5 (Accession #AA013295); Cry1Fb6 (Accession #ACD50892); Cry1Fb7 (Accession #ACD50893); Cry1Ga1 (Accession #CAA80233); Cry1Ga2 (Accession #CAA70506); Cry1Gb1 (Accession #AAD10291); Cry1Gb2 (Accession #AA013756); Cry1Gc1 (Accession #AAQ52381); Cry1Ha1 (Accession #CAA80236); Cry1Hb1 (Accession #AAA79694); Cry1Hb2 (Accession #HQ439786); Cry1H-like (Accession #AAF01213); Cry1Ia1 (Accession #CAA44633); Cry1Ia2 (Accession #AAA22354); Cry1Ia3 (Accession #AAC36999); Cry1Ia4 (Accession #AAB00958); Cry1Ia5 (Accession #CAA70124); Cry1Ia6 (Accession #AAC26910); Cry1Ia7 (Accession #AAM73516); Cry1Ia8 (Accession #AAK66742); Cry1Ia9 (Accession #AAQ08616); Cry1Ia10 (Accession #AAP86782); Cry1Ia11 (Accession #CAC85964); Cry1Ia12 (Accession #AAV53390); Cry1Ia13 (Accession #ABF83202); Cry1Ia14 (Accession #ACG63871); Cry1Ia15 (Accession #FJ617445); Cry1Ia16 (Accession #FJ617448); Cry1Ia17 (Accession #GU989199); Cry1Ia18 (Accession #ADK23801); Cry1Ia19 (Accession #HQ439787); Cry1Ia20 (Accession #JQ228426); Cry1Ia21 (Accession #JQ228424); Cry1Ia22 (Accession #JQ228427); Cry1Ia23 (Accession #JQ228428); Cry1Ia24 (Accession #JQ228429); Cry1Ia25 (Accession #JQ228430); Cry1Ia26 (Accession #JQ228431); Cry1Ia27 (Accession #JQ228432); Cry1Ia28 (Accession #JQ228433); Cry1Ia29 (Accession #JQ228434); Cry1Ia30 (Accession #JQ317686); Cry1Ia31 (Accession #JX944038); Cry1Ia32 (Accession #JX944039); Cry1Ia33 (Accession #JX944040); Cry1Ib1 (Accession #AAA82114); Cry1Ib2 (Accession #ABW88019); Cry1Ib3 (Accession #ACD75515); Cry1Ib4 (Accession #HM051227); Cry1Ib5 (Accession #HM070028); Cry1Ib6 (Accession #ADK38579); Cry1Ib7 (Accession #JN571740); Cry1Ib8 (Accession #JN675714); Cry1Ib9 (Accession #JN675715); Cry1Ib10 (Accession #JN675716); Cry1Ib11 (Accession #JQ228423); Cry1Ic1 (Accession #AAC62933); Cry1Ic2 (Accession #AAE71691); Cry1Id1 (Accession #AAD44366); Cry1Id2 (Accession #JQ228422); Cry1Ie1 (Accession #AAG43526); Cry1Ie2 (Accession #HM439636); Cry1Ie3 (Accession #KC156647); Cry1Ie4 (Accession #KC156681); Cry1If1 (Accession #AAQ52382); Cry1Ig1 (Accession #KC156701); Cry1I-like (Accession #AAC31094); Cry1I-like (Accession #ABG88859); Cry1Ja1 (Accession #AAA22341); Cry1Ja2 (Accession #HM070030); Cry1Ja3 (Accession #JQ228425); Cry1Jb1 (Accession #AAA98959); Cry1Jc1 (Accession #AAC31092); Cry1Jc2 (Accession #AAQ52372); Cry1Jd1 (Accession #CAC50779); Cry1Ka1 (Accession #AAB00376); Cry1Ka2 (Accession #HQ439783); Cry1La1 (Accession #AAS60191); Cry1La2 (Accession #HM070031); Cry1Ma1 (Accession #FJ884067); Cry1Ma2 (Accession #KC156659); Cry1Na1 (Accession #KC156648); Cry1Nb1 (Accession #KC156678); Cry1-like (Accession #AAC31091); Cry2Aa1 (Accession #AAA22335); Cry2Aa2 (Accession #AAA83516); Cry2Aa3 (Accession #D86064); Cry2Aa4 (Accession #AAC04867); Cry2Aa5 (Accession #CAA10671); Cry2Aa6 (Accession #CAA10672); Cry2Aa7 (Accession #CAA10670); Cry2Aa8 (Accession #AA013734); Cry2Aa9 (Accession #AA013750); Cry2Aa10 (Accession #AAQ04263); Cry2Aa11 (Accession #AAQ52384); Cry2Aa12 (Accession #AB183671); Cry2Aa13 (Accession #ABL01536); Cry2Aa14 (Accession #ACF04939); Cry2Aa15 (Accession #JN426947); Cry2Ab1 (Accession #AAA22342); Cry2Ab2 (Accession #CAA39075); Cry2Ab3 (Accession #AAG36762); Cry2Ab4 (Accession #AA013296); Cry2Ab5 (Accession #AAQ04609); Cry2Ab6 (Accession #AAP59457); Cry2Ab7 (Accession #AAZ66347); Cry2Ab8 (Accession #ABC95996); Cry2Ab9 (Accession #ABC74968); Cry2Ab10 (Accession #EF157306); Cry2Ab11 (Accession #CAM84575); Cry2Ab12 (Accession #ABM21764); Cry2Ab13 (Accession #ACG76120); Cry2Ab14 (Accession #ACG76121); Cry2Ab15 (Accession #HM037126); Cry2Ab16 (Accession #GQ866914); Cry2Ab17 (Accession #HQ439789); Cry2Ab18 (Accession #JN135255); Cry2Ab19 (Accession #JN135256); Cry2Ab20 (Accession #JN135257); Cry2Ab21 (Accession #JN135258); Cry2Ab22 (Accession #JN135259); Cry2Ab23 (Accession #JN135260); Cry2Ab24 (Accession #JN135261); Cry2Ab25 (Accession #JN415485); Cry2Ab26 (Accession #JN426946); Cry2Ab27 (Accession #JN415764); Cry2Ab28 (Accession #JN651494); Cry2Ac1 (Accession #CAA40536); Cry2Ac2 (Accession #AAG35410); Cry2Ac3 (Accession #AAQ52385); Cry2Ac4 (Accession #ABC95997); Cry2Ac5 (Accession #ABC74969); Cry2Ac6 (Accession #ABC74793); Cry2Ac7 (Accession #CAL18690); Cry2Ac8 (Accession #CAM09325); Cry2Ac9 (Accession #CAM09326); Cry2Ac10 (Accession #ABN15104); Cry2Ac11 (Accession #CAM83895); Cry2Ac12 (Accession #CAM83896); Cry2Ad1 (Accession #AAF09583); Cry2Ad2 (Accession #ABC86927); Cry2Ad3 (Accession #CAK29504); Cry2Ad4 (Accession #CAM32331); Cry2Ad5 (Accession #CA078739); Cry2Ae1 (Accession #AAQ52362); Cry2Af1 (Accession #ABO30519); Cry2Af2 (Accession #GQ866915); Cry2Ag1 (Accession #ACH91610); Cry2Ah1 (Accession #EU939453); Cry2Ah2 (Accession #ACL80665); Cry2Ah3 (Accession #GU073380); Cry2Ah4 (Accession #KC156702); Cry2Ai1 (Accession #FJ788388); Cry2Aj (Accession #); Cry2Ak1 (Accession #KC156660); Cry2Ba1 (Accession #KC156658); Cry3Aa1 (Accession #AAA22336); Cry3Aa2 (Accession #AAA22541); Cry3Aa3 (Accession #CAA68482); Cry3Aa4 (Accession #AAA22542); Cry3Aa5 (Accession #AAA50255); Cry3Aa6 (Accession #AAC43266); Cry3Aa7 (Accession #CAB41411); Cry3Aa8 (Accession #AAS79487); Cry3Aa9 (Accession #AAW05659); Cry3Aa10 (Accession #AAU29411); Cry3Aa11 (Accession #AAW82872); Cry3Aa12 (Accession #ABY49136); Cry3Ba1 (Accession #CAA34983); Cry3Ba2 (Accession #CAA00645); Cry3Ba3 (Accession #JQ397327); Cry3Bb1 (Accession #AAA22334); Cry3Bb2 (Accession #AAA74198); Cry3Bb3 (Accession #115475); Cry3Ca1 (Accession #CAA42469); Cry4Aa1 (Accession #CAA68485); Cry4Aa2 (Accession #BAA00179); Cry4Aa3 (Accession #CAD30148); Cry4Aa4 (Accession #AFB18317); Cry4A-like (Accession #AAY96321); Cry4Ba1 (Accession #CAA30312); Cry4Ba2 (Accession #CAA30114); Cry4Ba3 (Accession #AAA22337); Cry4Ba4 (Accession #BAA00178); Cry4Ba5 (Accession #CAD30095); Cry4Ba-like (Accession #ABC47686); Cry4Ca1 (Accession #EU646202); Cry4Cb1 (Accession #FJ403208); Cry4Cb2 (Accession #FJ597622); Cry4Cc1 (Accession #FJ403207); Cry5Aa1 (Accession #AAA67694); Cry5Ab1 (Accession #AAA67693); Cry5Ac1 (Accession #134543); Cry5Ad1 (Accession #ABQ82087); Cry5Ba1 (Accession #AAA68598); Cry5Ba2 (Accession #ABW88931); Cry5Ba3 (Accession #AFJ04417); Cry5Ca1 (Accession #HM461869); Cry5Ca2 (Accession #ZP_04123426); Cry5Da1 (Accession #HM461870); Cry5Da2 (Accession #ZP_04123980); Cry5Ea1 (Accession #HM485580); Cry5Ea2 (Accession #ZP_04124038); Cry6Aa1 (Accession #AAA22357); Cry6Aa2 (Accession #AAM46849); Cry6Aa3 (Accession #ABH03377); Cry6Ba1 (Accession #AAA22358); Cry7Aa1 (Accession #AAA22351); Cry7Ab1 (Accession #AAA21120); Cry7Ab2 (Accession #AAA21121); Cry7Ab3 (Accession #ABX24522); Cry7Ab4 (Accession #EU380678); Cry7Ab5 (Accession #ABX79555); Cry7Ab6 (Accession #AC144005); Cry7Ab7 (Accession #ADB89216); Cry7Ab8 (Accession #GU145299); Cry7Ab9 (Accession #ADD92572); Cry7Ba1 (Accession #ABB70817); Cry7Bb1 (Accession #KC156653); Cry7Ca1 (Accession #ABR67863); Cry7Cb1 (Accession #KC156698); Cry7Da1 (Accession #ACQ99547); Cry7Da2 (Accession #HM572236); Cry7Da3 (Accession #KC156679); Cry7Ea1 (Accession #HM035086); Cry7Ea2 (Accession #HM132124); Cry7Ea3 (Accession #EEM19403); Cry7Fa1 (Accession #HM035088); Cry7Fa2 (Accession #EEM19090); Cry7Fb1 (Accession #HM572235); Cry7Fb2 (Accession #KC156682); Cry7Ga1 (Accession #HM572237); Cry7Ga2 (Accession #KC156669); Cry7Gb1 (Accession #KC156650); Cry7Gc1 (Accession #KC156654); Cry7Gd1 (Accession #KC156697); Cry7Ha1 (Accession #KC156651); Cry71a1 (Accession #KC156665); Cry7Ja1 (Accession #KC156671); Cry7Ka1 (Accession #KC156680); Cry7Kb1 (Accession #BAM99306); Cry7La1 (Accession #BAM99307); Cry8Aa1 (Accession #AAA21117); Cry8Ab1 (Accession #EU044830); Cry8Ac1 (Accession #KC156662); Cry8Ad1 (Accession #KC156684); Cry8Ba1 (Accession #AAA21118); Cry8Bb1 (Accession #CAD57542); Cry8Bc1 (Accession #CAD57543); Cry8Ca1 (Accession #AAA21119); Cry8Ca2 (Accession #AAR98783); Cry8Ca3 (Accession #EU625349); Cry8Ca4 (Accession #ADB54826); Cry8Da1 (Accession #BAC07226); Cry8Da2 (Accession #BD133574); Cry8Da3 (Accession #BD133575); Cry8Db1 (Accession #BAF93483); Cry8Ea1 (Accession #AAQ73470); Cry8Ea2 (Accession #EU047597); Cry8Ea3 (Accession #KC855216); Cry8Fa1 (Accession #AAT48690); Cry8Fa2 (Accession #HQ174208); Cry8Fa3 (Accession #AFH78109); Cry8Ga1 (Accession #AAT46073); Cry8Ga2 (Accession #ABC42043); Cry8Ga3 (Accession #FJ198072); Cry8Ha1 (Accession #AAW81032); Cry8Ia1 (Accession #EU381044); Cry8Ia2 (Accession #GU073381); Cry8Ia3 (Accession #HM044664); Cry8Ia4 (Accession #KC156674); Cry8Ib1 (Accession #GU325772); Cry8Ib2 (Accession #KC156677); Cry8Ja1 (Accession #EU625348); Cry8Ka1 (Accession #FJ422558); Cry8Ka2 (Accession #ACN87262); Cry8Kb1 (Accession #HM123758); Cry8Kb2 (Accession #KC156675); Cry8La1 (Accession #GU325771); Cry8Ma1 (Accession #HM044665); Cry8Ma2 (Accession #EEM86551); Cry8Ma3 (Accession #HM210574); Cry8Na1 (Accession #HM640939); Cry8Pa1 (Accession #HQ388415); Cry8Qa1 (Accession #HQ441166); Cry8Qa2 (Accession #KC152468); Cry8Ra1 (Accession #AFP87548); Cry8Sa1 (Accession #JQ740599); Cry8Ta1 (Accession #KC156673); Cry8-like (Accession #FJ770571); Cry8-like (Accession #ABS53003); Cry9Aa1 (Accession #CAA41122); Cry9Aa2 (Accession #CAA41425); Cry9Aa3 (Accession #GQ249293); Cry9Aa4 (Accession #GQ249294); Cry9Aa5 (Accession #JX174110); Cry9Aa like (Accession #AAQ52376); Cry9Ba1 (Accession #CAA52927); Cry9Ba2 (Accession #GU299522); Cry9Bb1 (Accession #AAV28716); Cry9Ca1 (Accession #CAA85764); Cry9Ca2 (Accession #AAQ52375); Cry9Da1 (Accession #BAA19948); Cry9Da2 (Accession #AAB97923); Cry9Da3 (Accession #GQ249293); Cry9Da4 (Accession #GQ249297); Cry9Db1 (Accession #AAX78439); Cry9Dc1 (Accession #KC156683); Cry9Ea1 (Accession #BAA34908); Cry9Ea2 (Accession #AA012908); Cry9Ea3 (Accession #ABM21765); Cry9Ea4 (Accession #ACE88267); Cry9Ea5 (Accession #ACF04743); Cry9Ea6 (Accession #ACG63872); Cry9Ea7 (Accession #FJ380927); Cry9Ea8 (Accession #GQ249292); Cry9Ea9 (Accession #JN651495); Cry9Eb1 (Accession #CAC50780); Cry9Eb2 (Accession #GQ249298); Cry9Eb3 (Accession #KC156646); Cry9Ec1 (Accession #AAC63366); Cry9Ed1 (Accession #AAX78440); Cry9Ee1 (Accession #GQ249296); Cry9Ee2 (Accession #KC156664); Cry9Fa1 (Accession #KC156692); Cry9Ga1 (Accession #KC156699); Cry9-like (Accession #AAC63366); Cry10Aa1 (Accession #AAA22614); Cry10Aa2 (Accession #E00614); Cry10Aa3 (Accession #CAD30098); Cry10Aa4 (Accession #AFB18318); Cry10A-like (Accession #DQ167578); Cry11Aa1 (Accession #AAA22352); Cry11Aa2 (Accession #AAA22611); Cry11Aa3 (Accession #CAD30081); Cry11Aa4 (Accession #AFB18319); Cry11Aa-like (Accession #DQ166531); Cry11Ba1 (Accession #CAA60504); Cry11Bb1 (Accession #AAC97162); Cry11Bb2 (Accession #HM068615); Cry12Aa1 (Accession #AAA22355); Cry13Aa1 (Accession #AAA22356); Cry14Aa1 (Accession #AAA21516); Cry14Ab1 (Accession #KC156652); Cry15Aa1 (Accession #AAA22333); Cry16Aa1 (Accession #CAA63860); Cry17Aa1 (Accession #CAA67841); Cry18Aa1 (Accession #CAA67506); Cry18Ba1 (Accession #AAF89667); Cry18Ca1 (Accession #AAF89668); Cry19Aa1 (Accession #CAA68875); Cry19Ba1 (Accession #BAA32397); Cry19Ca1 (Accession #AFM37572); Cry20Aa1 (Accession #AAB93476); Cry20Ba1 (Accession #ACS93601); Cry20Ba2 (Accession #KC156694); Cry20-like (Accession #GQ144333); Cry21Aa1 (Accession #132932); Cry21Aa2 (Accession #166477); Cry21Ba1 (Accession #BAC06484); Cry21Ca1 (Accession #JF521577); Cry21Ca2 (Accession #KC156687); Cry21Da1 (Accession #JF521578); Cry22Aa1 (Accession #134547); Cry22Aa2 (Accession #CAD43579); Cry22Aa3 (Accession #ACD93211); Cry22Ab1 (Accession #AAK50456); Cry22Ab2 (Accession #CAD43577); Cry22Ba1 (Accession #CAD43578); Cry22Bb1 (Accession #KC156672); Cry23Aa1 (Accession #AAF76375); Cry24Aa1 (Accession #AAC61891); Cry24Ba1 (Accession #BAD32657); Cry24Ca1 (Accession #CAJ43600); Cry25Aa1 (Accession #AAC61892); Cry26Aa1 (Accession #AAD25075); Cry27Aa1 (Accession #BAA82796); Cry28Aa1 (Accession #AAD24189); Cry28Aa2 (Accession #AAG00235); Cry29Aa1 (Accession #CAC80985); Cry30Aa1 (Accession #CAC80986); Cry30Ba1 (Accession #BAD00052); Cry30Ca1 (Accession #BAD67157); Cry30Ca2 (Accession #ACU24781); Cry30Da1 (Accession #EF095955); Cry30Db1 (Accession #BAE80088); Cry30Ea1 (Accession #ACC95445); Cry30Ea2 (Accession #FJ499389); Cry30Fa1 (Accession #ACI22625); Cry30Ga1 (Accession #ACG60020); Cry30Ga2 (Accession #HQ638217); Cry31Aa1 (Accession #BAB11757); Cry31Aa2 (Accession #AAL87458); Cry31Aa3 (Accession #BAE79808); Cry31Aa4 (Accession #BAF32571); Cry31Aa5 (Accession #BAF32572); Cry31Aa6 (Accession #BAI44026); Cry31Ab1 (Accession #BAE79809); Cry31Ab2 (Accession #BAF32570); Cry31Ac1 (Accession #BAF34368); Cry31Ac2 (Accession #AB731600); Cry31Ad1 (Accession #BAI44022); Cry32Aa1 (Accession #AAG36711); Cry32Aa2 (Accession #GU063849); Cry32Ab1 (Accession #GU063850); Cry32Ba1 (Accession #BAB78601); Cry32Ca1 (Accession #BAB78602); Cry32Cb1 (Accession #KC156708); Cry32Da1 (Accession #BAB78603); Cry32Ea1 (Accession #GU324274); Cry32Ea2 (Accession #KC156686); Cry32Eb1 (Accession #KC156663); Cry32Fa1 (Accession #KC156656); Cry32Ga1 (Accession #KC156657); Cry32Ha1 (Accession #KC156661); Cry32Hb1 (Accession #KC156666); Cry32Ia1 (Accession #KC156667); Cry32Ja1 (Accession #KC156685); Cry32Ka1 (Accession #KC156688); Cry32La1 (Accession #KC156689); Cry32Ma1 (Accession #KC156690); Cry32Mb1 (Accession #KC156704); Cry32Na1 (Accession #KC156691); Cry32Oa1 (Accession #KC156703); Cry32Pa1 (Accession #KC156705); Cry32Qa1 (Accession #KC156706); Cry32Ra1 (Accession #KC156707); Cry32Sa1 (Accession #KC156709); Cry32Ta1 (Accession #KC156710); Cry32Ua1 (Accession #KC156655); Cry33Aa1 (Accession #AAL26871); Cry34Aa1 (Accession #AAG50341); Cry34Aa2 (Accession #AAK64560); Cry34Aa3 (Accession #AAT29032); Cry34Aa4 (Accession #AAT29030); Cry34Ab1 (Accession #AAG41671); Cry34Ac1 (Accession #AAG50118); Cry34Ac2 (Accession #AAK64562); Cry34Ac3 (Accession #AAT29029); Cry34Ba1 (Accession #AAK64565); Cry34Ba2 (Accession #AAT29033); Cry34Ba3 (Accession #AAT29031); Cry35Aa1 (Accession #AAG50342); Cry35Aa2 (Accession #AAK64561); Cry35Aa3 (Accession #AAT29028); Cry35Aa4 (Accession #AAT29025); Cry35Ab1 (Accession #AAG41672); Cry35Ab2 (Accession #AAK64563); Cry35Ab3 (Accession #AY536891); Cry35Ac1 (Accession #AAG50117); Cry35Ba1 (Accession #AAK64566); Cry35Ba2 (Accession #AAT29027); Cry35Ba3 (Accession #AAT29026); Cry36Aa1 (Accession #AAK64558); Cry37Aa1 (Accession #AAF76376); Cry38Aa1 (Accession #AAK64559); Cry39Aa1 (Accession #BAB72016); Cry40Aa1 (Accession #BAB72018); Cry40Ba1 (Accession #BAC77648); Cry40Ca1 (Accession #EU381045); Cry40Da1 (Accession #ACF15199); Cry41Aa1 (Accession #BAD35157); Cry41Ab1 (Accession #BAD35163); Cry41Ba1 (Accession #HM461871); Cry41Ba2 (Accession #ZP_04099652); Cry42Aa1 (Accession #BAD35166); Cry43Aa1 (Accession #BAD15301); Cry43Aa2 (Accession #BAD95474); Cry43Ba1 (Accession #BAD15303); Cry43Ca1 (Accession #KC156676); Cry43Cb1 (Accession #KC156695); Cry43Cc1 (Accession #KC156696); Cry43-like (Accession #BAD15305); Cry44Aa (Accession #BAD08532); Cry45Aa (Accession #BAD22577); Cry46Aa (Accession #BAC79010); Cry46Aa2 (Accession #BAG68906); Cry46Ab (Accession #BAD35170); Cry47Aa (Accession #AAY24695); Cry48Aa (Accession #CAJ18351); Cry48Aa2 (Accession #CAJ86545); Cry48Aa3 (Accession #CAJ86546); Cry48Ab (Accession #CAJ86548); Cry48Ab2 (Accession #CAJ86549); Cry49Aa (Accession #CAH56541); Cry49Aa2 (Accession #CAJ86541); Cry49Aa3 (Accession #CAJ86543); Cry49Aa4 (Accession #CAJ86544); Cry49Ab1 (Accession #CAJ86542); Cry50Aa1 (Accession #BAE86999); Cry50Ba1 (Accession #GU446675); Cry50Ba2 (Accession #GU446676); Cry51Aa1 (Accession #AB114444); Cry51Aa2 (Accession #GU570697); Cry52Aa1 (Accession #EF613489); Cry52Ba1 (Accession #FJ361760); Cry53Aa1 (Accession #EF633476); Cry53Ab1 (Accession #FJ361759); Cry54Aa1 (Accession #ACA52194); Cry54Aa2 (Accession #GQ140349); Cry54Ba1 (Accession #GU446677); Cry55Aa1 (Accession #ABW88932); Cry54Ab1 (Accession #JQ916908); Cry55Aa2 (Accession #AAE33526); Cry56Aa1 (Accession #ACU57499); Cry56Aa2 (Accession #GQ483512); Cry56Aa3 (Accession #JX025567); Cry57Aa1 (Accession #ANC87261); Cry58Aa1 (Accession #ANC87260); Cry59Ba1 (Accession #JN790647); Cry59Aa1 (Accession #ACR43758); Cry60Aa1 (Accession #ACU24782); Cry60Aa2 (Accession #EA057254); Cry60Aa3 (Accession #EEM99278); Cry60Ba1 (Accession #GU810818); Cry60Ba2 (Accession #EA057253); Cry60Ba3 (Accession #EEM99279); Cry61Aa1 (Accession #HM035087); Cry61Aa2 (Accession #HM132125); Cry61Aa3 (Accession #EEM19308); Cry62Aa1 (Accession #HM054509); Cry63Aa1 (Accession #BA144028); Cry64Aa1 (Accession #BAJ05397); Cry65Aa1 (Accession #HM461868); Cry65Aa2 (Accession #ZP_04123838); Cry66Aa1 (Accession #HM485581); Cry66Aa2 (Accession #ZP_04099945); Cry67Aa1 (Accession #HM485582); Cry67Aa2 (Accession #ZP_04148882); Cry68Aa1 (Accession #HQ113114); Cry69Aa1 (Accession #HQ401006); Cry69Aa2 (Accession #JQ821388); Cry69Ab1 (Accession #JN209957); Cry70Aa1 (Accession #JN646781); Cry70Ba1 (Accession #ADO51070); Cry70Bb1 (Accession #EEL67276); Cry71Aa1 (Accession #JX025568); Cry72Aa1 (Accession #JX025569).

[0290] Examples of δ-endotoxins also include but are not limited to Cry1A proteins of U.S. Pat. Nos. 5,880,275 and 7,858,849; a DIG-3 or DIG-11 toxin (N-terminal deletion of α-helix 1 and/or α-helix 2 variants of Cry proteins such as Cry1A) of U.S. Pat. Nos. 8,304,604 and 8.304,605, Cry1B of U.S. patent application Ser. No. 10/525,318; Cry1C of U.S. Pat. No. 6,033,874; Cry1F of U.S. Pat. Nos. 5,188,960, 6,218,188; Cry1A/F chimeras of U.S. Pat. Nos. 7,070,982; 6,962,705 and 6,713,063); a Cry2 protein such as Cry2Ab protein of U.S. Pat. No. 7,064,249); a Cry3A protein including but not limited to an engineered hybrid insecticidal protein (eHIP) created by fusing unique combinations of variable regions and conserved blocks of at least two different Cry proteins (US Patent Application Publication Number 2010/0017914); a Cry4 protein; a Cry5 protein; a Cry6 protein; Cry8 proteins of U.S. Pat. Nos. 7,329,736, 7,449,552, 7,803,943, 7,476,781, 7,105,332, 7,378,499 and 7,462,760; a Cry9 protein such as such as members of the Cry9A, Cry9B, Cry9C, Cry9D, Cry9E, and Cry9F families; a Cry15 protein of Naimov, et al., (2008) Applied and Environmental Microbiology 74:7145-7151; a Cry22, a Cry34Ab1 protein of U.S. Pat. Nos. 6,127,180, 6,624,145 and 6,340,593; a CryET33 and CryET34 protein of U.S. Pat. Nos. 6,248,535, 6,326,351, 6,399,330, 6,949,626, 7,385,107 and 7,504,229; a CryET33 and CryET34 homologs of US Patent Publication Number 2006/0191034, 2012/0278954, and PCT Publication Number WO 2012/139004; a Cry35Ab1 protein of U.S. Pat. Nos. 6,083,499, 6,548,291 and 6,340,593; a Cry46 protein, a Cry 51 protein, a Cry binary toxin; a TIC901 or related toxin; TIC807 of US 2008/0295207; ET29, ET37, TIC809, TIC810, TIC812, TIC127, TIC128 of PCT US 2006/033867; AXMI-027, AXMI-036, and AXMI-038 of U.S. Pat. No. 8,236,757; AXMI-031, AXMI-039, AXMI-040, AXMI-049 of U.S. Pat. No. 7,923,602; AXMI-018, AXMI-020, and AXMI-021 of WO 2006/083891; AXMI-010 of WO 2005/038032; AXMI-003 of WO 2005/021585; AXMI-008 of US 2004/0250311; AXMI-006 of US 2004/0216186; AXMI-007 of US 2004/0210965; AXMI-009 of US 2004/0210964; AXMI-014 of US 2004/0197917; AXMI-004 of US 2004/0197916; AXMI-028 and AXMI-029 of WO 2006/119457; AXMI-007, AXMI-008, AXMI-0080rf2, AXMI-009, AXMI-014 and AXMI-004 of WO 2004/074462; AXMI-150 of U.S. Pat. No. 8,084,416; AXMI-205 of US20110023184; AXMI-011, AXMI-012, AXMI-013, AXMI-015, AXMI-019, AXMI-044, AXMI-037, AXMI-043, AXMI-033, AXMI-034, AXMI-022, AXMI-023, AXMI-041, AXMI-063, and AXMI-064 of US 2011/0263488; AXMI-R1 and related proteins of US 2010/0197592; AXMI221Z, AXMI222z, AXMI223z, AXMI224z and AXMI225z of WO 2011/103248; AXMI218, AXMI219, AXMI220, AXMI226, AXMI227, AXMI228, AXMI229, AXMI230, and AXMI231 of WO11/103247; AXMI-115, AXMI-113, AXMI-005, AXMI-163 and AXMI-184 of U.S. Pat. No. 8,334,431; AXMI-001, AXMI-002, AXMI-030, AXMI-035, and AXMI-045 of US 2010/0298211; AXMI-066 and AXMI-076 of US20090144852; AXMI128, AXMI130, AXMI131, AXMI133, AXMI140, AXMI141, AXMI142, AXMI143, AXMI144, AXMI146, AXMI148, AXMI149, AXMI152, AXMI153, AXMI154, AXMI155, AXMI156, AXMI157, AXMI158, AXMI162, AXMI165, AXMI166, AXMI167, AXMI168, AXMI169, AXMI170, AXMI171, AXMI172, AXMI173, AXMI174, AXMI175, AXMI176, AXMI177, AXMI178, AXMI179, AXMI180, AXMI181, AXMI182, AXMI185, AXMI186, AXMI187, AXMI188, AXMI189 of U.S. Pat. No. 8,318,900; AXMI079, AXMI080, AXMI081, AXMI082, AXMI091, AXMI092, AXMI096, AXMI097, AXMI098, AXMI099, AXMI100, AXMI101, AXMI102, AXMI103, AXMI104, AXMI107, AXMI108, AXMI109, AXMI110, AXMI111, AXMI112, AXMI114, AXMI116, AXMI117, AXMI118, AXMI119, AXMI120, AXMI121, AXMI122, AXMI123, AXMI124, AXMI1257, AXMI1268, AXMI127, AXMI129, AXMI164, AXMI151, AXMI161, AXMI183, AXMI132, AXMI138, AXMI137 of US 2010/0005543; and Cry proteins such as Cry1A and Cry3A having modified proteolytic sites of U.S. Pat. No. 8,319,019; and a Cry1Ac, Cry2Aa and Cry1Ca toxin protein from Bacillus thuringiensis strain VBTS 2528 of US Patent Application Publication Number 2011/0064710. Other Cry proteins are well known to one skilled in the art (see, Crickmore, et al., “Bacillus thuringiensis toxin nomenclature” (2011), at lifesci.sussex.ac.uk/home/Neil_Crickmore/Bt/ which can be accessed on the world-wide web using the “www” prefix). The insecticidal activity of Cry proteins is well known to one skilled in the art (for review, see, van Frannkenhuyzen, (2009) J. Invert. Path. 101:1-16). The use of Cry proteins as transgenic plant traits is well known to one skilled in the art and Cry-transgenic plants including but not limited to Cry1Ac, Cry1Ac+Cry2Ab, Cry1Ab, Cry1A.105, Cry1F, Cry1Fa2, Cry1F+Cry1Ac, Cry2Ab, Cry3A, mCry3A, Cry3Bb1, Cry34Ab1, Cry35Ab1, Vip3A, mCry3A, Cry9c and CBI-Bt have received regulatory approval (see, Sanahuja, (2011) Plant Biotech Journal 9:283-300 and the CERA (2010) GM Crop Database Center for Environmental Risk Assessment (CERA), ILSI Research Foundation, Washington D.C. at cera-gmc.org/index.php?action=gm_crop_database which can be accessed on the world-wide web using the “www” prefix). More than one pesticidal proteins well known to one skilled in the art can also be expressed in plants such as Vip3Ab & Cry1Fa (US2012/0317682), Cry1BE & Cry1F (US2012/0311746), Cry1CA & Cry1AB (US2012/0311745), Cry1F & CryCa (US2012/0317681), Cry1DA & Cry1BE (US2012/0331590), Cry1DA & Cry1Fa (US2012/0331589), Cry1AB & Cry1BE (US2012/0324606), and Cry1Fa & Cry2Aa, Cry1I or Cry1E (US2012/0324605). Pesticidal proteins also include insecticidal lipases including lipid acyl hydrolases of U.S. Pat. No. 7,491,869, and cholesterol oxidases such as from Streptomyces (Purcell et al. (1993) Biochem Biophys Res Commun 15:1406-1413). Pesticidal proteins also include VIP (vegetative insecticidal proteins) toxins of U.S. Pat. Nos. 5,877,012, 6,107,279, 6,137,033, 7,244,820, 7,615,686, and 8,237,020, and the like. Other VIP proteins are well known to one skilled in the art (see, lifesci.sussex.ac.uk/home/Neil_Crickmore/Bt/vip.html which can be accessed on the world-wide web using the “www” prefix). Pesticidal proteins also include toxin complex (TC) proteins, obtainable from organisms such as Xenorhabdus, Photorhabdus and Paenibacillus (see, U.S. Pat. Nos. 7,491,698 and 8,084,418). Some TC proteins have “stand alone” insecticidal activity and other TC proteins enhance the activity of the stand-alone toxins produced by the same given organism. The toxicity of a “stand-alone” TC protein (from Photorhabdus, Xenorhabdus or Paenibacillus, for example) can be enhanced by one or more TC protein “potentiators” derived from a source organism of a different genus. There are three main types of TC proteins. As referred to herein, Class A proteins (“Protein A”) are stand-alone toxins. Class B proteins (“Protein B”) and Class C proteins (“Protein C”) enhance the toxicity of Class A proteins. Examples of Class A proteins are TcbA, TcdA, XptA1 and XptA2. Examples of Class B proteins are TcaC, TcdB, XptB1Xb and XptC1Wi. Examples of Class C proteins are TccC, XptC1Xb and XptB1Wi. Pesticidal proteins also include spider, snake and scorpion venom proteins. Examples of spider venom peptides include but are not limited to lycotoxin-1 peptides and mutants thereof (U.S. Pat. No. 8,334,366).
[0291] (C) A polynucleotide encoding an insect-specific hormone or pheromone such as an ecdysteroid and juvenile hormone, a variant thereof, a mimetic based thereon or an antagonist or agonist thereof. See, for example, the disclosure by Hammock, et al., (1990) Nature 344:458, of baculovirus expression of cloned juvenile hormone esterase, an inactivator of juvenile hormone.
[0292] (D) A polynucleotide encoding an insect-specific peptide which, upon expression, disrupts the physiology of the affected pest. For example, see the disclosures of, Regan, (1994) J. Biol. Chem. 269:9 (expression cloning yields DNA coding for insect diuretic hormone receptor); Pratt, et al., (1989) Biochem. Biophys. Res. Comm. 163:1243 (an allostatin is identified in Diploptera puntata); Chattopadhyay, et al., (2004) Critical Reviews in Microbiology 30(1):33-54; Zjawiony, (2004) J Nat Prod 67(2):300-310; Carlini and Grossi-de-Sa, (2002) Toxicon 40(11):1515-1539; Ussuf, et al., (2001) Curr Sci. 80(7):847-853 and Vasconcelos and Oliveira, (2004) Toxicon 44(4):385-403. See also, U.S. Pat. No. 5,266,317 to Tomalski, et al., who disclose genes encoding insect-specific toxins.
[0293] (E) A polynucleotide encoding an enzyme responsible for a hyperaccumulation of a monoterpene, a sesquiterpene, a steroid, hydroxamic acid, a phenylpropanoid derivative or another non-protein molecule with insecticidal activity.
[0294] (F) A polynucleotide encoding an enzyme involved in the modification, including the post-translational modification, of a biologically active molecule; for example, a glycolytic enzyme, a proteolytic enzyme, a lipolytic enzyme, a nuclease, a cyclase, a transaminase, an esterase, a hydrolase, a phosphatase, a kinase, a phosphorylase, a polymerase, an elastase, a chitinase and a glucanase, whether natural or synthetic. See, PCT Application WO 1993/02197 in the name of Scott, et al., which discloses the nucleotide sequence of a callase gene. DNA molecules which contain chitinase-encoding sequences can be obtained, for example, from the ATCC® under Accession Numbers 39637 and 67152. See also, Kramer, et al., (1993) Insect Biochem. Molec. Biol. 23:691, who teach the nucleotide sequence of a cDNA encoding tobacco hookworm chitinase and Kawalleck, et al., (1993) Plant Molec. Biol. 21:673, who provide the nucleotide sequence of the parsley ubi4-2 polyubiquitin gene, and U.S. Pat. Nos. 6,563,020; 7,145,060 and 7,087,810.
[0295] (G) A polynucleotide encoding a molecule that stimulates signal transduction. For example, see the disclosure by Botella, et al., (1994) Plant Molec. Biol. 24:757, of nucleotide sequences for mung bean calmodulin cDNA clones, and Griess, et al., (1994) Plant Physiol. 104:1467, who provide the nucleotide sequence of a maize calmodulin cDNA clone.
[0296] (H) A polynucleotide encoding a hydrophobic moment peptide. See, PCT Application WO 1995/16776 and U.S. Pat. No. 5,580,852 disclosure of peptide derivatives of Tachyplesin which inhibit fungal plant pathogens) and PCT Application WO 1995/18855 and U.S. Pat. No. 5,607,914 (teaches synthetic antimicrobial peptides that confer disease resistance).
[0297] (I) A polynucleotide encoding a membrane permease, a channel former or a channel blocker. For example, see the disclosure by Jaynes, et al., (1993) Plant Sci. 89:43, of heterologous expression of a cecropin-beta lytic peptide analog to render transgenic tobacco plants resistant to Pseudomonas solanacearum.
[0298] (J) A gene encoding a viral-invasive protein or a complex toxin derived therefrom. For example, the accumulation of viral coat proteins in transformed plant cells imparts resistance to viral infection and/or disease development effected by the virus from which the coat protein gene is derived, as well as by related viruses. See, Beachy, et al., (1990) Ann. Rev. Phytopathol. 28:451. Coat protein-mediated resistance has been conferred upon transformed plants against alfalfa mosaic virus, cucumber mosaic virus, tobacco streak virus, potato virus X, potato virus Y, tobacco etch virus, tobacco rattle virus and tobacco mosaic virus. Id.
[0299] (K) A gene encoding an insect-specific antibody or an immunotoxin derived therefrom. Thus, an antibody targeted to a critical metabolic function in the insect gut would inactivate an affected enzyme, killing the insect. Cf. Taylor, et al., Abstract #497, SEVENTH INT'L SYMPOSIUM ON MOLECULAR PLANT-MICROBE INTERACTIONS (Edinburgh, Scotland, 1994) (enzymatic inactivation in transgenic tobacco via production of single-chain antibody fragments).
[0300] (L) A gene encoding a virus-specific antibody. See, for example, Tavladoraki, et al., (1993) Nature 366:469, who show that transgenic plants expressing recombinant antibody genes are protected from virus attack.
[0301] (M) A polynucleotide encoding a developmental-arrestive protein produced in nature by a pathogen or a parasite. Thus, fungal endo alpha-1,4-D-polygalacturonases facilitate fungal colonization and plant nutrient release by solubilizing plant cell wall homo-alpha-1,4-D-galacturonase. See, Lamb, et al., (1992) Bio/Technology 10:1436. The cloning and characterization of a gene which encodes a bean endopolygalacturonase-inhibiting protein is described by Toubart, et al., (1992) Plant J. 2:367.
[0302] (N) A polynucleotide encoding a developmental-arrestive protein produced in nature by a plant. For example, Logemann, et al., (1992) Bio/Technology 10:305, have shown that transgenic plants expressing the barley ribosome-inactivating gene have an increased resistance to fungal disease.
[0303] (O) Genes involved in the Systemic Acquired Resistance (SAR) Response and/or the pathogenesis related genes. Briggs, (1995) Current Biology 5(2), Pieterse and Van Loon, (2004) Curr. Opin. Plant Bio. 7(4):456-64 and Somssich, (2003) Cell 113(7):815-6.
[0304] (P) Antifungal genes (Cornelissen and Melchers, (1993) Pl. Physiol. 101:709-712 and Parijs, et al., (1991) Planta 183:258-264 and Bushnell, et al., (1998) Can. J. of Plant Path. 20(2):137-149. Also see, U.S. patent application Ser. Nos. 09/950,933; 11/619,645; 11/657,710; 11/748,994; 11/774,121 and U.S. Pat. Nos. 6,891,085 and 7,306,946. LysM Receptor-like kinases for the perception of chitin fragments as a first step in plant defense response against fungal pathogens (US 2012/0110696).
[0305] (Q) Detoxification genes, such as for fumonisin, beauvericin, moniliformin and zearalenone and their structurally related derivatives. For example, see, U.S. Pat. Nos. 5,716,820; 5,792,931; 5,798,255; 5,846,812; 6,083,736; 6,538,177; 6,388,171 and 6,812,380.
[0306] (R) A polynucleotide encoding a Cystatin and cysteine proteinase inhibitors. See, U.S. Pat. No. 7,205,453.
[0307] (S) Defensin genes. See, WO 2003/000863 and U.S. Pat. Nos. 6,911,577; 6,855,865; 6,777,592 and 7,238,781.
[0308] (T) Genes conferring resistance to nematodes. See, e.g., PCT Application WO 1996/30517; PCT Application WO 1993/19181, WO 2003/033651 and Urwin, et al., (1998) Planta 204:472-479, Williamson, (1999) Curr Opin Plant Bio. 2(4):327-31; U.S. Pat. Nos. 6,284,948 and 7,301,069 and miR164 genes (WO 2012/058266).
[0309] (U) Genes that confer resistance to Phytophthora Root Rot, such as the Rps 1, Rps 1-a, Rps 1-b, Rps 1-c, Rps 1-d, Rps 1-e, Rps 1-k, Rps 2, Rps 3-a, Rps 3-b, Rps 3-c, Rps 4, Rps 5, Rps 6, Rps 7 and other Rps genes. See, for example, Shoemaker, et al., Phytophthora Root Rot Resistance Gene Mapping in Soybean, Plant Genome IV Conference, San Diego, Calif. (1995).
[0310] (V) Genes that confer resistance to Brown Stem Rot, such as described in U.S. Pat. No. 5,689,035 and incorporated by reference for this purpose.
[0311] (W) Genes that confer resistance to Colletotrichum, such as described in US Patent Application Publication US 2009/0035765 and incorporated by reference for this purpose. This includes the Rcg locus that may be utilized as a single locus conversion.
   2. Transgenes that Confer Resistance to a Herbicide, for Example:
[0312] (A) A polynucleotide encoding resistance to a herbicide that inhibits the growing point or meristem, such as an imidazolinone or a sulfonylurea. Exemplary genes in this category code for mutant ALS and AHAS enzyme as described, for example, by Lee, et al., (1988) EMBO J. 7:1241 and Miki, et al., (1990) Theor. Appl. Genet. 80:449, respectively. See also, U.S. Pat. Nos. 5,605,011; 5,013,659; 5,141,870; 5,767,361; 5,731,180; 5,304,732; 4,761,373; 5,331,107; 5,928,937 and 5,378,824; U.S. patent application Ser. No. 11/683,737 and International Publication WO 1996/33270.
[0313] (B) A polynucleotide encoding a protein for resistance to Glyphosate (resistance imparted by mutant 5-enolpyruvl-3-phosphikimate synthase (EPSP) and aroA genes, respectively) and other phosphono compounds such as glufosinate (phosphinothricin acetyl transferase (PAT) and Streptomyces hygroscopicus phosphinothricin acetyl transferase (bar) genes), and pyridinoxy or phenoxy proprionic acids and cyclohexones (ACCase inhibitor-encoding genes). See, for example, U.S. Pat. No. 4,940,835 to Shah, et al., which discloses the nucleotide sequence of a form of EPSPS which can confer glyphosate resistance. U.S. Pat. No. 5,627,061 to Barry, et al., also describes genes encoding EPSPS enzymes. See also, U.S. Pat. Nos. 6,566,587; 6,338,961; 6,248,876 B1; 6,040,497; 5,804,425; 5,633,435; 5,145,783; 4,971,908; 5,312,910; 5,188,642; 5,094,945, 4,940,835; 5,866,775; 6,225,114 B1; 6,130,366; 5,310,667; 4,535,060; 4,769,061; 5,633,448; 5,510,471; Re. 36,449; RE 37,287 E and 5,491,288 and International Publications EP 1173580; WO 2001/66704; EP 1173581 and EP 1173582, which are incorporated herein by reference for this purpose. Glyphosate resistance is also imparted to plants that express a gene encoding a glyphosate oxido-reductase enzyme as described more fully in U.S. Pat. Nos. 5,776,760 and 5,463,175, which are incorporated herein by reference for this purpose. In addition glyphosate resistance can be imparted to plants by the over expression of genes encoding glyphosate N-acetyltransferase. See, for example, U.S. Pat. Nos. 7,462,481; 7,405,074 and US Patent Application Publication Number US 2008/0234130. A DNA molecule encoding a mutant aroA gene can be obtained under ATCC® Accession Number 39256, and the nucleotide sequence of the mutant gene is disclosed in U.S. Pat. No. 4,769,061 to Comai. EP Application Number 0 333 033 to Kumada, et al., and U.S. Pat. No. 4,975,374 to Goodman, et al., disclose nucleotide sequences of glutamine synthetase genes which confer resistance to herbicides such as L-phosphinothricin. The nucleotide sequence of a phosphinothricin-acetyl-transferase gene is provided in EP Application Numbers 0 242 246 and 0 242 236 to Leemans, et al.; De Greef, et al., (1989) Bio/Technology 7:61, describe the production of transgenic plants that express chimeric bar genes coding for phosphinothricin acetyl transferase activity. See also, U.S. Pat. Nos. 5,969,213; 5,489,520; 5,550,318; 5,874,265; 5,919,675; 5,561,236; 5,648,477; 5,646,024; 6,177,616 B1 and 5,879,903, which are incorporated herein by reference for this purpose. Exemplary genes conferring resistance to phenoxy proprionic acids and cyclohexones, such as sethoxydim and haloxyfop, are the Acc1-S1, Acc1-S2 and Acc1-S3 genes described by Marshall, et al., (1992) Theor. Appl. Genet. 83:435.
[0314] (C) A polynucleotide encoding a protein for resistance to herbicide that inhibits photosynthesis, such as a triazine (psbA and gs+genes) and a benzonitrile (nitrilase gene). Przibilla, et al., (1991) Plant Cell 3:169, describe the transformation of Chlamydomonas with plasmids encoding mutant psbA genes. Nucleotide sequences for nitrilase genes are disclosed in U.S. Pat. No. 4,810,648 to Stalker and DNA molecules containing these genes are available under ATCC® Accession Numbers 53435, 67441 and 67442. Cloning and expression of DNA coding for a glutathione S-transferase is described by Hayes, et al., (1992) Biochem. J. 285:173.
[0315] (D) A polynucleotide encoding a protein for resistance to Acetohydroxy acid synthase, which has been found to make plants that express this enzyme resistant to multiple types of herbicides, has been introduced into a variety of plants (see, e.g., Hattori, et al., (1995) Mol Gen Genet. 246:419). Other genes that confer resistance to herbicides include: a gene encoding a chimeric protein of rat cytochrome P4507A1 and yeast NADPH-cytochrome P450 oxidoreductase (Shiota, et al., (1994) Plant Physiol 106:17), genes for glutathione reductase and superoxide dismutase (Aono, et al., (1995) Plant Cell Physiol 36:1687) and genes for various phosphotransferases (Datta, et al., (1992) Plant Mol Biol 20:619).
[0316] (E) A polynucleotide encoding resistance to a herbicide targeting Protoporphyrinogen oxidase (protox) which is necessary for the production of chlorophyll. The protox enzyme serves as the target for a variety of herbicidal compounds. These herbicides also inhibit growth of all the different species of plants present, causing their total destruction. The development of plants containing altered protox activity which are resistant to these herbicides are described in U.S. Pat. Nos. 6,288,306 B1; 6,282,837 B1 and 5,767,373 and International Publication WO 2001/12825.
[0317] (F) The aad-1 gene (originally from Sphingobium herbicidovorans) encodes the aryloxyalkanoate dioxygenase (AAD-1) protein. The trait confers tolerance to 2,4-dichlorophenoxyacetic acid and aryloxyphenoxypropionate (commonly referred to as “fop” herbicides such as quizalofop) herbicides. The aad-1 gene, itself, for herbicide tolerance in plants was first disclosed in WO 2005/107437 (see also, US 2009/0093366). The aad-12 gene, derived from Delftia acidovorans, which encodes the aryloxyalkanoate dioxygenase (AAD-12) protein that confers tolerance to 2,4-dichlorophenoxyacetic acid and pyridyloxyacetate herbicides by deactivating several herbicides with an aryloxyalkanoate moiety, including phenoxy auxin (e.g., 2,4-D, MCPA), as well as pyridyloxy auxins (e.g., fluroxypyr, triclopyr).
[0318] (G) A polynucleotide encoding a herbicide resistant dicamba monooxygenase disclosed in US Patent Application Publication 2003/0135879 for imparting dicamba tolerance;
[0319] (H) A polynucleotide molecule encoding bromoxynil nitrilase (Bxn) disclosed in U.S. Pat. No. 4,810,648 for imparting bromoxynil tolerance;
[0320] (I) A polynucleotide molecule encoding phytoene (crtl) described in Misawa, et al., (1993) Plant J. 4:833-840 and in Misawa, et al., (1994) Plant J. 6:481-489 for norflurazon tolerance.
   3. Transgenes that Confer or Contribute to an Altered Grain Characteristic
[0321] Such as:
[0322] (A) Altered fatty acids, for example, by
[0323] (1) Down-regulation of stearoyl-ACP to increase stearic acid content of the plant. See, Knultzon, et al., (1992) Proc. Natl. Acad. Sci. USA 89:2624 and WO 1999/64579 (Genes to Alter Lipid Profiles in Corn).
[0324] (2) Elevating oleic acid via FAD-2 gene modification and/or decreasing linolenic acid via FAD-3 gene modification (see, U.S. Pat. Nos. 6,063,947; 6,323,392; 6,372,965 and WO 1993/11245).
[0325] (3) Altering conjugated linolenic or linoleic acid content, such as in WO 2001/12800.
[0326] (4) Altering LEC1, AGP, Dek1, Superal1, mi1 ps, various Ipa genes such as Ipa1, Ipa3, hpt or hggt. For example, see, WO 2002/42424, WO 1998/22604, WO 2003/011015, WO 2002/057439, WO 2003/011015, U.S. Pat. Nos. 6,423,886, 6,197,561, 6,825,397 and US Patent Application Publication Numbers US 2003/0079247, US 2003/0204870 and Rivera-Madrid, et al., (1995) Proc. Natl. Acad. Sci. 92:5620-5624.
[0327] (5) Genes encoding delta-8 desaturase for making long-chain polyunsaturated fatty acids (U.S. Pat. Nos. 8,058,571 and 8,338,152), delta-9 desaturase for lowering saturated fats (U.S. Pat. No. 8,063,269), Primula Δ6-desaturase for improving omega-3 fatty acid profiles.
[0328] (6) Isolated nucleic acids and proteins associated with lipid and sugar metabolism regulation, in particular, lipid metabolism protein (LMP) used in methods of producing transgenic plants and modulating levels of seed storage compounds including lipids, fatty acids, starches or seed storage proteins and use in methods of modulating the seed size, seed number, seed weights, root length and leaf size of plants (EP 2404499).
[0329] (7) Altering expression of a High-Level Expression of Sugar-Inducible 2 (HSI2) protein in the plant to increase or decrease expression of HSI2 in the plant. Increasing expression of HSI2 increases oil content while decreasing expression of HSI2 decreases abscisic acid sensitivity and/or increases drought resistance (US Patent Application Publication Number 2012/0066794).
[0330] (8) Expression of cytochrome b5 (Cb5) alone or with FAD2 to modulate oil content in plant seed, particularly to increase the levels of omega-3 fatty acids and improve the ratio of omega-6 to omega-3 fatty acids (US Patent Application Publication Number 2011/0191904).
[0331] (9) Nucleic acid molecules encoding wrinkled1-like polypeptides for modulating sugar metabolism (U.S. Pat. No. 8,217,223).
[0332] (B) Altered phosphorus content, for example, by the
[0333] (1) Introduction of a phytase-encoding gene would enhance breakdown of phytate, adding more free phosphate to the transformed plant. For example, see, Van Hartingsveldt, et al., (1993) Gene 127:87, for a disclosure of the nucleotide sequence of an Aspergillus niger phytase gene.
[0334] (2) Modulating a gene that reduces phytate content. In maize, this, for example, could be accomplished, by cloning and then re-introducing DNA associated with one or more of the alleles, such as the LPA alleles, identified in maize mutants characterized by low levels of phytic acid, such as in WO 2005/113778 and/or by altering inositol kinase activity as in WO 2002/059324, US Patent Application Publication Number 2003/0009011, WO 2003/027243, US Patent Application Publication Number 2003/0079247, WO 1999/05298, U.S. Pat. Nos. 6,197,561, 6,291,224, 6,391,348, WO 2002/059324, US Patent Application Publication Number 2003/0079247, WO 1998/45448, WO 1999/55882, WO 2001/04147.
[0335] (C) Altered carbohydrates affected, for example, by altering a gene for an enzyme that affects the branching pattern of starch or, a gene altering thioredoxin such as NTR and/or TRX (see, U.S. Pat. No. 6,531,648. which is incorporated by reference for this purpose) and/or a gamma zein knock out or mutant such as cs27 or TUSC27 or en27 (see, U.S. Pat. No. 6,858,778 and US Patent Application Publication Number 2005/0160488, US Patent Application Publication Number 2005/0204418, which are incorporated by reference for this purpose). See, Shiroza, et al., (1988) J. Bacteriol. 170:810 (nucleotide sequence of Streptococcus mutant fructosyltransferase gene), Steinmetz, et al., (1985) Mol. Gen. Genet. 200:220 (nucleotide sequence of Bacillus subtilis levansucrase gene), Pen, et al., (1992) Bio/Technology 10:292 (production of transgenic plants that express Bacillus licheniformis alpha-amylase), Elliot, et al., (1993) Plant Molec. Biol. 21:515 (nucleotide sequences of tomato invertase genes), Søgaard, et al., (1993) J. Biol. Chem. 268:22480 (site-directed mutagenesis of barley alpha-amylase gene) and Fisher, et al., (1993) Plant Physiol. 102:1045 (maize endosperm starch branching enzyme II), WO 1999/10498 (improved digestibility and/or starch extraction through modification of UDP-D-xylose 4-epimerase, Fragile 1 and 2, Ref1, HCHL, C4H), U.S. Pat. No. 6,232,529 (method of producing high oil seed by modification of starch levels (AGP)). The fatty acid modification genes mentioned herein may also be used to affect starch content and/or composition through the interrelationship of the starch and oil pathways.
[0336] (D) Altered antioxidant content or composition, such as alteration of tocopherol or tocotrienols. For example, see, U.S. Pat. No. 6,787,683, US Patent Application Publication Number 2004/0034886 and WO 2000/68393 involving the manipulation of antioxidant levels and WO 2003/082899 through alteration of a homogentisate geranyl geranyl transferase (hggt).
[0337] (E) Altered essential seed amino acids. For example, see, U.S. Pat. No. 6,127,600 (method of increasing accumulation of essential amino acids in seeds), U.S. Pat. No. 6,080,913 (binary methods of increasing accumulation of essential amino acids in seeds), U.S. Pat. No. 5,990,389 (high lysine), WO 1999/40209 (alteration of amino acid compositions in seeds), WO 1999/29882 (methods for altering amino acid content of proteins), U.S. Pat. No. 5,850,016 (alteration of amino acid compositions in seeds), WO 1998/20133 (proteins with enhanced levels of essential amino acids), US Patent Number 5,885,802 (high methionine), U.S. Pat. No. 5,885,801 (high threonine), U.S. Pat. No. 6,664,445 (plant amino acid biosynthetic enzymes), U.S. Pat. No. 6,459,019 (increased lysine and threonine), U.S. Pat. No. 6,441,274 (plant tryptophan synthase beta subunit), U.S. Pat. No. 6,346,403 (methionine metabolic enzymes), U.S. Pat. No. 5,939,599 (high sulfur), U.S. Pat. No. 5,912,414 (increased methionine), WO 1998/56935 (plant amino acid biosynthetic enzymes), WO 1998/45458 (engineered seed protein having higher percentage of essential amino acids), WO 1998/42831 (increased lysine), U.S. Pat. No. 5,633,436 (increasing sulfur amino acid content), U.S. Pat. No. 5,559,223 (synthetic storage proteins with defined structure containing programmable levels of essential amino acids for improvement of the nutritional value of plants), WO 1996/01905 (increased threonine), WO 1995/15392 (increased lysine), US Patent Application Publication Number 2003/0163838, US Patent Application Publication Number 2003/0150014, US Patent Application Publication Number 2004/0068767, U.S. Pat. No. 6,803,498, WO 2001/79516.
   4. Genes that Control Male-Sterility:

[0338] There are several methods of conferring genetic male sterility available, such as multiple mutant genes at separate locations within the genome that confer male sterility, as disclosed in U.S. Pat. Nos. 4,654,465 and 4,727,219 to Brar, et al., and chromosomal translocations as described by Patterson in U.S. Pat. Nos. 3,861,709 and 3,710,511. In addition to these methods, Albertsen, et al., U.S. Pat. No. 5,432,068, describe a system of nuclear male sterility which includes: identifying a gene which is critical to male fertility; silencing this native gene which is critical to male fertility; removing the native promoter from the essential male fertility gene and replacing it with an inducible promoter; inserting this genetically engineered gene back into the plant; and thus creating a plant that is male sterile because the inducible promoter is not “on” resulting in the male fertility gene not being transcribed. Fertility is restored by inducing or turning “on”, the promoter, which in turn allows the gene that confers male fertility to be transcribed.
[0339] (A) Introduction of a deacetylase gene under the control of a tapetum-specific promoter and with the application of the chemical N-Ac-PPT (WO 2001/29237).
[0340] (B) Introduction of various stamen-specific promoters (WO 1992/13956, WO 1992/13957).
[0341] (C) Introduction of the barnase and the barstar gene (Paul, et al., (1992) Plant Mol. Biol. 19:611-622).

[0342] For additional examples of nuclear male and female sterility systems and genes, see also, U.S. Pat. Nos. 5,859,341; 6,297,426; 5,478,369; 5,824,524; 5,850,014 and 6,265,640, all of which are hereby incorporated by reference.

5. Genes that create a site for site specific DNA integration.

[0343] This includes the introduction of FRT sites that may be used in the FLP/FRT system and/or Lox sites that may be used in the Cre/Loxp system. For example, see, Lyznik, et al., (2003) Plant Cell Rep 21:925-932 and WO 1999/25821, which are hereby incorporated by reference. Other systems that may be used include the Gln recombinase of phage Mu (Maeser, et al., (1991) Vicki Chandler, The Maize Handbook ch. 118 (Springer-Verlag 1994), the Pin recombinase of E. coli (Enomoto, et al., 1983) and the R/RS system of the pSRi plasmid (Araki, et al., 1992).

6. Genes that Affect Abiotic Stress Resistance

[0344] Including but not limited to flowering, ear and seed development, enhancement of nitrogen utilization efficiency, altered nitrogen responsiveness, drought resistance or tolerance, cold resistance or tolerance and salt resistance or tolerance and increased yield under stress.
[0345] (A) For example, see: WO 2000/73475 where water use efficiency is altered through alteration of malate; U.S. Pat. Nos. 5,892,009, 5,965,705, 5,929,305, 5,891,859, 6,417,428, 6,664,446, 6,706,866, 6,717,034, 6,801,104, WO 2000/060089, WO 2001/026459, WO 2001/035725, WO 2001/034726, WO 2001/035727, WO 2001/036444, WO 2001/036597, WO 2001/036598, WO 2002/015675, WO 2002/017430, WO 2002/077185, WO 2002/079403, WO 2003/013227, WO 2003/013228, WO 2003/014327, WO 2004/031349, WO 2004/076638, WO 199809521.
[0346] (B) WO 199938977 describing genes, including CBF genes and transcription factors effective in mitigating the negative effects of freezing, high salinity and drought on plants, as well as conferring other positive effects on plant phenotype.
[0347] (C) US Patent Application Publication Number 2004/0148654 and WO 2001/36596 where abscisic acid is altered in plants resulting in improved plant phenotype such as increased yield and/or increased tolerance to abiotic stress.
[0348] (D) WO 2000/006341, WO 2004/090143, U.S. Pat. Nos. 7,531,723 and 6,992,237 where cytokinin expression is modified resulting in plants with increased stress tolerance, such as drought tolerance, and/or increased yield. Also see, WO 2002/02776, WO 2003/052063, JP 2002/281975, U.S. Pat. No. 6,084,153, WO 2001/64898, U.S. Pat. Nos. 6,177,275 and 6,107,547 (enhancement of nitrogen utilization and altered nitrogen responsiveness).
[0349] (E) For ethylene alteration, see, US Patent Application Publication Number 2004/0128719, US Patent Application Publication Number 2003/0166197 and WO 2000/32761.
[0350] (F) For plant transcription factors or transcriptional regulators of abiotic stress, see, e.g., US Patent Application Publication Number 2004/0098764 or US Patent Application Publication Number 2004/0078852.
[0351] (G) Genes that increase expression of vacuolar pyrophosphatase such as AVP1 (U.S. Pat. No. 8,058,515) for increased yield; nucleic acid encoding a HSFA4 or a HSFA5 (Heat Shock Factor of the class A4 or A5) polypeptides, an oligopeptide transporter protein (OPT4-like) polypeptide; a plastochron2-like (PLA2-like) polypeptide or a Wuschel related homeobox 1-like (WOX1-like) polypeptide (U. Patent Application Publication Number US 2011/0283420).
[0352] (H) Down regulation of polynucleotides encoding poly (ADP-ribose) polymerase (PARP) proteins to modulate programmed cell death (U.S. Pat. No. 8,058,510) for increased vigor.
[0353] (I) Polynucleotide encoding DTP21 polypeptides for conferring drought resistance (US Patent Application Publication Number US 2011/0277181).
[0354] (J) Nucleotide sequences encoding ACC Synthase 3 (ACS3) proteins for modulating development, modulating response to stress, and modulating stress tolerance (US Patent Application Publication Number US 2010/0287669).
[0355] (K) Polynucleotides that encode proteins that confer a drought tolerance phenotype (DTP) for conferring drought resistance (WO 2012/058528).
[0356] (L) Tocopherol cyclase (TC) genes for conferring drought and salt tolerance (US Patent Application Publication Number 2012/0272352).
[0357] (M) CAAX amino terminal family proteins for stress tolerance (U.S. Pat. No. 8,338,661).
[0358] (N) Mutations in the SAL1 encoding gene have increased stress tolerance, including increased drought resistant (US Patent Application Publication Number 2010/0257633).
[0359] (O) Expression of a nucleic acid sequence encoding a polypeptide selected from the group consisting of: GRF polypeptide, RAA1-like polypeptide, SYR polypeptide, ARKL polypeptide, and YTP polypeptide increasing yield-related traits (US Patent Application Publication Number 2011/0061133).
[0360] (P) Modulating expression in a plant of a nucleic acid encoding a Class III Trehalose Phosphate Phosphatase (TPP) polypeptide for enhancing yield-related traits in plants, particularly increasing seed yield (US Patent Application Publication Number 2010/0024067).

[0361] Other genes and transcription factors that affect plant growth and agronomic traits such as yield, flowering, plant growth and/or plant structure, can be introduced or introgressed into plants, see e.g., WO 1997/49811 (LHY), WO 1998/56918 (ESD4), WO 1997/10339 and U.S. Pat. No. 6,573,430 (TFL), U.S. Pat. No. 6,713,663 (FT), WO 1996/14414 (CON), WO 1996/38560, WO 2001/21822 (VRN1), WO 2000/44918 (VRN2), WO 1999/49064 (GI), WO 2000/46358 (FR1), WO 1997/29123, U.S. Pat. Nos. 6,794,560, 6,307,126 (GAI), WO 1999/09174 (D8 and Rht) and WO 2004/076638 and WO 2004/031349 (transcription factors).

7. Genes that Confer Increased Yield
[0362] (A) A transgenic crop plant transformed by a 1-AminoCyclopropane-1-Carboxylate Deaminase-like Polypeptide (ACCDP) coding nucleic acid, wherein expression of the nucleic acid sequence in the crop plant results in the plant's increased root growth, and/or increased yield, and/or increased tolerance to environmental stress as compared to a wild type variety of the plant (U.S. Pat. No. 8,097,769).
[0363] (B) Over-expression of maize zinc finger protein gene (Zm-ZFP1) using a seed preferred promoter has been shown to enhance plant growth, increase kernel number and total kernel weight per plant (US Patent Application Publication Number 2012/0079623).
[0364] (C) Constitutive over-expression of maize lateral organ boundaries (LOB) domain protein (Zm-LOBDP1) has been shown to increase kernel number and total kernel weight per plant (US Patent Application Publication Number 2012/0079622).
[0365] (D) Enhancing yield-related traits in plants by modulating expression in a plant of a nucleic acid encoding a VIM1 (Variant in Methylation 1)-like polypeptide or a VTC2-like (GDP-L-galactose phosphorylase) polypeptide or a DUF1685 polypeptide or an ARF6-like (Auxin Responsive Factor) polypeptide (WO 2012/038893).
[0366] (E) Modulating expression in a plant of a nucleic acid encoding a Ste20-like polypeptide or a homologue thereof gives plants having increased yield relative to control plants (EP 2431472).
[0367] (F) Genes encoding nucleoside diphosphatase kinase (NDK) polypeptides and homologs thereof for modifying the plant's root architecture (US Patent Application Publication Number 2009/0064373).
   8. Genes that Confer Plant Digestibility.
[0368] (A) Altering the level of xylan present in the cell wall of a plant by modulating expression of xylan synthase (U.S. Pat. No. 8,173,866).

[0369] In some embodiment the stacked trait may be a trait or event that has received regulatory approval including but not limited to the events in Table 5A-5F.

TABLE 5A
Medicago sativa Alfalfa

| Event | Company | Description |
|---|---|---|
| J101, J163 | Monsanto Company and | Glyphosate herbicide tolerant |
| | Forage Genetics | alfalfa (lucerne) produced by |
| | International | inserting a gene encoding the |
| | | enzyme 5-enolypyruvylshikimate- |
| | | 3-phosphate synthase (EPSPS) |
| | | from the CP4 strain of |
| | | Agrobacterium tumefaciens. |

TABLE 5B
Melianthus annuus Sunflower

| Event | Company | Description |
|---|---|---|
| X81359 | BASF Inc. | Tolerance to imidazolinone herbicides by |
| | | selection of a naturally occuring mutant. |

TABLE 5C
Oryza sativa Rice

| Event | Company | Description |
|---|---|---|
| CL121, CL141, | BASF Inc. | Tolerance to the imidazolinone herbicide, |
| CFX51 | | imazethapyr, induced by chemical mutagenesis of |
| | | the acetolactate synthase (ALS) enzyme using |
| | | ethyl methanesulfonate (EMS). |
| IMINTA-1, | BASF Inc. | Tolerance to imidazolinone herbicides induced by |
| IMINTA-4 | | chemical mutagenesis of the acetolactate |
| | | synthase (ALS) enzyme using sodium azide. |
| LLRICE06, | Aventis CropScience | Glufosinate ammonium herbicide tolerant rice |
| LLRICE62 | | produced by inserting a modified phosphinothricin |
| | | acetyltransferase (PAT) encoding gene from the |
| | | soil bacterium Streptomyces hygroscopicus). |
| LLRICE601 | Bayer CropScience | Glufosinate ammonium herbicide tolerant rice |
| | (Aventis | produced by inserting a modified phosphinothricin |
| | CropScience(AgrEvo)) | acetyltransferase (PAT) encoding gene from the |
| | | soil bacterium Streptomyces hygroscopicus). |
| PWC16 | BASF Inc. | Tolerance to the imidazolinone herbicide, |
| | | imazethapyr, induced by chemical mutagenesis of |
| | | the acetolactate synthase (ALS) enzyme using |
| | | ethyl methanesulfonate (EMS). |

TABLE 5C
Triticum aestivum Wheat

| Event | Company | Description |
|---|---|---|
| AP205CL | BASF Inc. | Selection for a mutagenized version |
| | | of the enzyme acetohydroxyacid |
| | | synthase (AHAS), also known as |
| | | acetolactate synthase (ALS) or |
| | | acetolactate pyruvate- lyase. |
| AP602CL | BASF Inc. | Selection for a mutagenized version |
| | | of the enzyme acetohydroxyacid |
| | | synthase (AHAS), also knownas |
| | | acetolactate synthase (ALS) or |
| | | acetolactate pyruvate- lyase. |
| BW255-2, | BASF Inc. | Selection for a mutagenized version |
| BW238-3 | | of the enzyme acetohydroxyacid |
| | | synthase (AHAS), also known as |
| | | acetolactate synthase (ALS) or |
| | | acetolactate pyruvate- lyase. |
| BW7 | BASF Inc. | Tolerance to imidazolinone herbicides |
| | | induced by chemical mutagenesis of |
| | | the acetohydroxyacid synthase (AHAS) |
| | | gene using sodium azide. |
| MON71800 | Monsanto | Glyphosate tolerant wheat variety |
| | Company | produced by inserting a modified |
| | | 5-enolpyruvylshikimate-3-phosphate |
| | | synthase (EPSPS) encoding gene from |
| | | the soil bacterium Agrobacterium |
| | | tumefaciens, strain CP4. |
| SWP965001 | Cyanamid Crop | Selection for a mutagenized version |
| | Protection | of the enzyme acetohydroxyacid |
| | | synthase (AHAS), also known as |
| | | acetolactate synthase (ALS) or |
| | | acetolactate pyruvate- lyase. |
| Teal 11A | BASF Inc. | Selection for a mutagenized version |
| | | of the enzyme acetohydroxyacid |
| | | synthase (AHAS), also known as |
| | | acetolactate synthase (ALS) or |
| | | acetolactate pyruvate- lyase. |

TABLE 5E
Glycine max L. Soybean

| Event | Company | Description |
|---|---|---|
| A2704-12, | Bayer CropScience | Glufosinate ammonium herbicide tolerant soybean |
| A2704-21, | (Aventis CropScience | produced by inserting a modified phosphinothricin |
| A5547-35 | (AgrEvo)) | acetyltransferase (PAT) encoding gene from the |
| | | soil bacterium Streptomyces viridochromogenes. |
| A5547-127 | Bayer CropScience | Glufosinate ammonium herbicide tolerant soybean |
| | (Aventis CropScience | produced by inserting a modified phosphinothricin |
| | (AgrEvo)) | acetyltransferase (PAT) encoding gene from the |
| | | soil bacterium Streptomyces viridochromogenes. |
| BPS-CV127-9 | BASF Inc. | The introduced csr1-2 gene from Arabidopsis thaliana |
| | | encodes an acetohydroxyacid synthase |
| | | protein that confers tolerance to imidazolinone |
| | | herbicides due to a point mutation that results in a |
| | | single amino acid substitution in which the serine |
| | | residue at position 653 is replaced by asparagine |
| | | (S653N). |
| DP-305423 | Pioneer Hi-Bred | High oleic acid soybean produced by inserting |
| | International Inc. | additional copies of a portion of the omega-6 |
| | | desaturase encoding gene, gm-fad2-1 resulting in |
| | | silencing of the endogenous omega-6 desaturase |
| | | gene (FAD2-1). |
| DP356043 | Pioneer Hi-Bred | Soybean event with two herbicide tolerance |
| | International Inc. | genes: glyphosate N-acetlytransferase, which |
| | | detoxifies glyphosate, and a modified acetolactate |
| | | synthase (ALS) gene which is tolerant to ALS- |
| | | inhibiting herbicides. |
| G94-1, G94-19, | DuPont Canada | High oleic acid soybean produced by inserting a |
| G168 | Agricultural Products | second copy of the fatty acid desaturase |
| | | (GmFad2-1) encoding gene from soybean, which |
| | | resulted in “silencing” of the endogenous host |
| | | gene. |
| GTS 40-3-2 | Monsanto Company | Glyphosate tolerant soybean variety produced by |
| | | inserting a modified 5-enolpyruvylshikimate-3- |
| | | phosphate synthase (EPSPS) encoding gene from |
| | | the soil bacterium Agrobacterium tumefaciens. |
| GU262 | Bayer CropScience | Glufosinate ammonium herbicide tolerant soybean |
| | (Aventis | produced by inserting a modified phosphinothricin |
| | CropScience(AgrEvo)) | acetyltransferase (PAT) encoding gene from the |
| | | soil bacterium Streptomyces viridochromogenes. |
| MON87701 | Monsanto Company | Resistance to Lepidopteran pests of soybean |
| | | including velvetbean caterpillar |
| | | (Anticarsia gemmatalis) and soybean looper |
| | | (Pseudoplusia includens). |
| MON87701 × | Monsanto Company | Glyphosate herbicide tolerance through |
| MON89788 | | expression of the EPSPS encoding gene from |
| | | A. tumefaciens strain CP4, and resistance to |
| | | Lepidopteran pests of soybean including |
| | | velvetbean caterpillar (Anticarsia gemmatalis) and |
| | | soybean looper (Pseudoplusia includens) via |
| | | expression of the Cry1Ac encoding gene from |
| | | B. thuringiensis. |
| MON89788 | Monsanto Company | Glyphosate-tolerant soybean produced by |
| | | inserting a modified 5-enolpyruvylshikimate-3- |
| | | phosphate synthase (EPSPS) encoding aroA |
| | | (epsps) gene from Agrobacterium tumefaciens |
| | | CP4. |
| OT96-15 | Agriculture & | Low linolenic acid soybean produced through |
| | Agri-Food Canada | traditional cross-breeding to incorporate the novel |
| | | trait from a naturally occurring fan1 gene mutant |
| | | that was selected for low linolenic acid. |
| W62, W98 | Bayer CropScience | Glufosinate ammonium herbicide tolerant soybean |
| | (Aventis | produced by inserting a modified phosphinothricin |
| | CropScience(AgrEvo)) | acetyltransferase (PAT) encoding gene from the |
| | | soil bacterium Streptomyces hygroscopicus. |

TABLE 5F
Zea mays L. Maize

| Event | Company | Description |
|---|---|---|
| 176 | Syngenta Seeds, | Insect-resistant maize produced by inserting the |
| | Inc. | Cry1Ab gene from Bacillus thuringiensis subsp. |
| | | kurstaki. The genetic modification affords |
| | | resistance to attack by the European corn borer |
| | | (ECB). |
| 3751IR | Pioneer Hi-Bred | Selection of somaclonal variants by culture of |
| | International Inc. | embryos on imidazolinone containing media. |
| 676, 678, | Pioneer Hi-Bred | Male-sterile and glufosinate ammonium herbicide |
| 680 | International Inc. | tolerant maize produced by inserting genes |
| | | encoding DNA adenine methylase and |
| | | phosphinothricin acetyltransferase (PAT) from |
| | | Escherichia coli and Streptomyces viridochromogenes, |
| | | respectively. |
| B16 | Dekalb Genetics | Glufosinate ammonium herbicide tolerant maize |
| (DLL25) | Corporation | produced by inserting the gene encoding |
| | | phosphinothricin acetyltransferase (PAT) from |
| | | Streptomyces hygroscopicus. |
| BT11 | Syngenta Seeds, | Insect-resistant and herbicide tolerant maize |
| (X4334CBR, | Inc. | produced by inserting the Cry1Ab gene from |
| X4734CBR) | | Bacillus thuringiensis subsp. kurstaki, and the |
| | | phosphinothricin N-acetyltransferase (PAT) |
| | | encoding gene from S. viridochromogenes. |
| BT11 × | Syngenta Seeds, | Stacked insect resistant and herbicide tolerant |
| GA21 | Inc. | maize produced by conventional cross breeding of |
| | | parental lines BT11 (OECD unique identifier: SYN- |
| | | BTO11-1) and GA21 (OECD unique identifier: |
| | | MON-OOO21-9). |
| BT11 × | Syngenta Seeds, | Resistance to Coleopteran pests, particularly corn |
| MIR162 × | Inc. | rootworm pests (Diabrotica spp.) and several |
| MIR604 × | | Lepidopteran pests of corn, including European |
| GA21 | | corn borer (ECB, Ostrinia nubilalis), corn earworm |
| | | (CEW, Helicoverpa zea), fall army worm (FAW, |
| | | Spodoptera frugiperda), and black cutworm (BCW, |
| | | Agrotis ipsilon), tolerance to glyphosate and |
| | | glufosinate-ammonium containing herbicides. |
| BT11 × | Syngenta Seeds, | Stacked insect resistant and herbicide tolerant |
| MIR162 | Inc. | maize produced by conventional cross breeding of |
| | | parental lines BT11 (OECD unique identifier: SYN- |
| | | BTO11-1) and MIR162 (OECD unique identifier: |
| | | SYN-IR162-4). Resistance to the European Corn |
| | | Borer and tolerance to the herbicide glufosinate |
| | | ammonium (Liberty) is derived from BT11, which |
| | | contains the Cry1Ab gene from Bacillus thuringiensis subsp. |
| | | kurstaki, and the phosphinothricin N-acetyltransferase (PAT) |
| | | encoding gene from S. viridochromogenes. |
| | | Resistance to other Lepidopteran pests, including |
| | | H. zea, S. frugiperda, A. ipsilon, and S. albicosta, |
| | | is derived from MIR162, which contains the vip3Aa |
| | | gene from Bacillus thuringiensis strain AB88. |
| BT11 × | Syngenta Seeds, | Bacillus thuringiensis Cry1Ab delta-endotoxin |
| MIR162 × | Inc. | protein and the genetic material necessary for its |
| MIR604 | | production (via elements of vector pZO1502) in |
| | | Event Bt11 corn (OECD Unique Identifier: SYN- |
| | | BTO11-1) × Bacillus thuringiensis Vip3Aa20 |
| | | insecticidal protein and the genetic material |
| | | necessary for its production (via elements of |
| | | vector pNOV1300) in Event MIR162 maize (OECD |
| | | Unique Identifier: SYN-IR162-4) × modified Cry3A |
| | | protein and the genetic material necessary for its |
| | | production (via elements of vector pZM26) in |
| | | Event MIR604 corn (OECD Unique Identifier: |
| | | SYN-IR6O4-5). |
| CBH-351 | Aventis | Insect-resistant and glufosinate ammonium |
| | CropScience | herbicide tolerant maize developed by inserting |
| | | genes encoding Cry9C protein from |
| | | Bacillus thuringiensis subsp tolworthi and |
| | | phosphinothricin acetyltransferase (PAT) from |
| | | Streptomyces hygroscopicus. |
| DAS-06275-8 | DOW AgroSciences | Lepidopteran insect resistant and glufosinate |
| | LLC | ammonium herbicide-tolerant maize variety |
| | | produced by inserting the Cry1F gene from |
| | | Bacillus thuringiensis var aizawai and the |
| | | phosphinothricin acetyltransferase (PAT) from |
| | | Streptomyces hygroscopicus. |
| BT11 × | Syngenta Seeds, | Stacked insect resistant and herbicide tolerant |
| MIR604 | Inc. | maize produced by conventional cross breeding of |
| | | parental lines BT11 (OECD unique identifier: SYN- |
| | | BTO11-1) and MIR604 (OECD unique identifier: |
| | | SYN-IR6O5-5). Resistance to the European Corn |
| | | Borer and tolerance to the herbicide glufosinate |
| | | ammonium (Liberty) is derived from BT11, which |
| | | contains the Cry1Ab gene from Bacillus thuringiensis |
| | | subsp. kurstaki, and the phosphinothricin N- |
| | | acetyltransferase (PAT) encoding gene from |
| | | S. viridochromogenes. |
| | | Corn rootworm-resistance is derived from MIR604 |
| | | which contains the mCry3A gene from |
| | | Bacillus thuringiensis. |
| BT11 × | Syngenta Seeds, | Stacked insect resistant and herbicide tolerant |
| MIR604 × | Inc. | maize produced by conventional cross breeding of |
| GA21 | | parental lines BT11 (OECD unique identifier: SYN- |
| | | BTO11-1), MIR604 (OECD unique identifier: SYN- |
| | | IR6O5-5) and GA21 (OECD unique identifier: |
| | | MON-OOO21-9). Resistance to the European |
| | | Corn Borer and tolerance to the herbicide |
| | | glufosinate ammonium (Liberty) is derived from |
| | | BT11, which contains the Cry1Ab gene from |
| | | Bacillus thuringiensis subsp. kurstaki, and the |
| | | phosphinothricin N-acetyltransferase (PAT) |
| | | encoding gene from S. viridochromogenes. Corn |
| | | rootworm-resistance is derived from MIR604 |
| | | which contains the mCry3A gene from |
| | | Bacillus thuringiensis. Tolerance to glyphosate herbicide |
| | | is derived from GA21 which contains a a modified |
| | | EPSPS gene from maize. |
| DAS-59122-7 | DOW AgroSciences | Corn rootworm-resistant maize produced by |
| | LLC and Pioneer | inserting the Cry34Ab1 and Cry35Ab1 genes from |
| | Hi-Bred | Bacillus thuringiensis strain PS149B1. The PAT |
| | International Inc. | encoding gene from Streptomyces viridochromogenes |
| | | was introduced as a selectable marker. |
| DAS-59122-7 × | DOW AgroSciences | Stacked insect resistant and herbicide tolerant |
| TC1507 × | LLC and Pioneer | maize produced by conventional cross breeding of |
| NK603 | Hi-Bred | parental lines DAS-59122-7 (OECD unique |
| | International Inc. | identifier: DAS-59122-7) and TC1507 (OECD |
| | | unique identifier: DAS-O15O7-1) with NK603 |
| | | (OECD unique identifier: MON-OO6O3-6). Corn |
| | | rootworm-resistance is derived from DAS-59122-7 |
| | | which contains the Cry34Ab1 and Cry35Ab1 |
| | | genes from Bacillus thuringiensis strain PS149B1. |
| | | Lepidopteran resistance and tolerance to |
| | | glufosinate ammonium herbicide is derived from |
| | | TC1507. Tolerance to glyphosate herbicide is |
| | | derived from NK603. |
| DBT418 | Dekalb Genetics | Insect-resistant and glufosinate ammonium |
| | Corporation | herbicide tolerant maize developed by inserting |
| | | genes encoding Cry1AC protein from Bacillus |
| | | thuringiensis subsp kurstaki and |
| | | phosphinothricin acetyltransferase (PAT) from |
| | | Streptomyces hygroscopicus |
| MIR604 × | Syngenta Seeds, | Stacked insect resistant and herbicide tolerant |
| GA21 | Inc. | maize produced by conventional cross breeding of |
| | | parental lines MIR604 (OECD unique identifier: |
| | | SYN-IR6O5-5) and GA21 (OECD unique identifier: |
| | | MON-OOO21-9). Corn rootworm-resistance is |
| | | derived from MIR604 which contains the mCry3A |
| | | gene from Bacillus thuringiensis. Tolerance to |
| | | glyphosate herbicide is derived from GA21. |
| MON80100 | Monsanto Company | Insect-resistant maize produced by inserting the |
| | | Cry1Ab gene from Bacillus thuringiensis subsp. |
| | | kurstaki. The genetic modification affords |
| | | resistance to attack by the European corn borer |
| | | (ECB). |
| MON802 | Monsanto Company | Insect-resistant and glyphosate herbicide tolerant |
| | | maize produced by inserting the genes encoding |
| | | the Cry1Ab protein from Bacillus thuringiensis and |
| | | the 5-enolpyruvylshikimate-3-phosphate synthase |
| | | (EPSPS) from A. tumefaciens strain CP4. |
| MON809 | Pioneer Hi-Bred | Resistance to European corn borer (Ostrinia nubilalis) |
| | International | by introduction of a synthetic Cry1Ab |
| | Inc. | gene. Glyphosate resistance via introduction of the |
| | | bacterial version of a plant enzyme, 5-enolpyruvyl |
| | | shikimate-3-phosphate synthase (EPSPS). |
| MON810 | Monsanto Company | Insect-resistant maize produced by inserting a |
| | | truncated form of the Cry1Ab gene from |
| | | Bacillus thuringiensis subsp. kurstaki HD-1. |
| | | The genetic modification affords resistance to |
| | | attack by the European corn borer (ECB). |
| MON810 × | Monsanto Company | Stacked insect resistant and enhanced lysine |
| LY038 | | content maize derived from conventional cross- |
| | | breeding of the parental lines MON810 (OECD |
| | | identifier: MON-OO81O-6) and LY038 (OECD |
| | | identifier: REN-OOO38-3). |
| MON810 × | Monsanto Company | Stacked insect resistant and glyphosate tolerant |
| MON88017 | | maize derived from conventional cross-breeding of |
| | | the parental lines MON810 (OECD identifier: |
| | | MON-OO81O-6) and MON88017 (OECD |
| | | identifier: MON-88O17-3). European corn borer |
| | | (ECB) resistance is derived from a truncated form |
| | | of the Cry1Ab gene from Bacillus thuringiensis |
| | | subsp. kurstaki HD-1 present in MON810. Corn |
| | | rootworm resistance is derived from the Cry3Bb1 |
| | | gene from Bacillus thuringiensis subspecies |
| | | kumamotoensis strain EG4691 present in |
| | | MON88017. Glyphosate tolerance is derived from |
| | | a 5-enolpyruvylshikimate-3-phosphate synthase |
| | | (EPSPS) encoding gene from Agrobacterium tumefaciens |
| | | strain CP4 present in MON88017. |
| MON832 | Monsanto Company | Introduction, by particle bombardment, of |
| | | glyphosate oxidase (GOX) and a modified 5- |
| | | enolpyruvyl shikimate-3-phosphate synthase |
| | | (EPSPS), an enzyme involved in the shikimate |
| | | biochemical pathway for the production of the |
| | | aromatic amino acids. |
| MON863 | Monsanto Company | Corn rootworm resistant maize produced by |
| | | inserting the Cry3Bb1 gene from |
| | | Bacillus thuringiensis subsp. kumamotoensis. |
| MON863 × | Monsanto Company | Stacked insect resistant corn hybrid derived from |
| MON810 | | conventional cross-breeding of the parental lines |
| | | MON863 (OECD identifier: MON-OO863-5) and |
| | | MON810 (OECD identifier: MON-OO81O-6) |
| MON863 × | Monsanto Company | Stacked insect resistant and herbicide tolerant |
| MON810 × | | corn hybrid derived from conventional cross- |
| NK603 | | breeding of the stacked hybrid MON-OO863-5 × |
| | | MON-OO81O-6 and NK603 (OECD |
| | | identifier: MON-OO6O3-6). |
| MON863 × | Monsanto Company | Stacked insect resistant and herbicide tolerant |
| NK603 | | corn hybrid derived from conventional cross- |
| | | breeding of the parental lines MON863 (OECD |
| | | identifier: MON-OO863-5) and NK603 (OECD |
| | | identifier: MON-OO6O3-6). |
| MON87460 | Monsanto Company | MON 87460 was developed to provide reduced |
| | | yield loss under water-limited conditions compared |
| | | to conventional maize. Efficacy in MON 87460 is |
| | | derived by expression of the inserted Bacillus subtilis |
| | | cold shock protein B (CspB). |
| MON88017 | Monsanto Company | Corn rootworm-resistant maize produced by |
| | | inserting the Cry3Bb1 gene from |
| | | Bacillus thuringiensis subspecies kumamotoensis |
| | | strain EG4691. Glyphosate tolerance derived by |
| | | inserting a 5-enolpyruvylshikimate-3-phosphate |
| | | synthase (EPSPS) encoding gene from |
| | | Agrobacterium tumefaciens strain CP4. |
| MON89034 | Monsanto Company | Maize event expressing two different insecticidal |
| | | proteins from Bacillus thuringiensis providing |
| | | resistance to number of Lepidopteran pests. |
| MON89034 × | Monsanto Company | Stacked insect resistant and glyphosate tolerant |
| MON88017 | | maize derived from conventional cross-breeding of |
| | | the parental lines MON89034 (OECD identifier: |
| | | MON-89O34-3) and MON88017 (OECD |
| | | identifier: MON-88O17-3). Resistance to |
| | | Lepidopteran insects is derived from two Cry |
| | | genes present in MON89043. Corn rootworm |
| | | resistance is derived from a single Cry genes and |
| | | glyphosate tolerance is derived from the 5- |
| | | enolpyruvylshikimate-3-phosphate synthase |
| | | (EPSPS) encoding gene from |
| | | Agrobacterium tumefaciens present in MON88017. |
| MON89034 × | Monsanto Company | Stacked insect resistant and herbicide tolerant |
| NK603 | | maize produced by conventional cross breeding of |
| | | parental lines MON89034 (OECD identifier: MON- |
| | | 89034-3) with NK603 (OECD unique identifier: |
| | | MON-OO6O3-6). Resistance to Lepidopteran |
| | | insects is derived from two Cry genes present in |
| | | MON89043. Tolerance to glyphosate herbicide is |
| | | derived from NK603. |
| NK603 × | Monsanto Company | Stacked insect resistant and herbicide tolerant corn |
| MON810 | | hybrid derived from conventional cross-breeding of the |
| | | parental lines NK603 (OECD identifier: MON-OO6O3-6) |
| | | and MON810 (OECD identifier: MON-OO81O-6). |
| MON89034 × | Monsanto Company | Stacked insect resistant and herbicide tolerant maize |
| TC1507 × | and Mycogen | produced by conventional cross breeding of parental |
| MON88017 × | Seeds c/o Dow | lines: MON89034, TC1507, MON88017, and DAS- |
| DAS-59122-7 | AgroSciences LLC | 59122. Resistance to the above-ground and below- |
| | | ground insect pests and tolerance to glyphosate and |
| | | glufosinate-ammonium containing herbicides. |
| MS3 | Bayer CropScience | Male sterility caused by expression of the barnase |
| | (Aventis | ribonuclease gene from Bacillus amyloliquefaciens; PPT |
| | CropScience(AgrEvo)) | resistance was via PPT-acetyltransferase (PAT). |
| MS6 | Bayer CropScience | Male sterility caused by expression of the barnase |
| | (Aventis | ribonuclease gene from Bacillus amyloliquefaciens; PPT |
| | CropScience(AgrEvo)) | resistance was via PPT-acetyltransferase (PAT). |
| NK603 | Monsanto Company | Introduction, by particle bombardment, of a modified 5- |
| | | enolpyruvyl shikimate-3-phosphate synthase (EPSPS), |
| | | an enzyme involved in the shikimate biochemical |
| | | pathway for the production of the aromatic amino acids. |
| NK603 × | Monsanto Company | Stacked glufosinate ammonium and glyphosate |
| T25 | | herbicide tolerant maize hybrid derived from |
| | | conventional cross-breeding of the parental lines NK603 |
| | | (OECD identifier: MON-OO6O3-6) and T25 (OECD |
| | | identifier: ACS-ZM003-2). |
| T25 × | Bayer CropScience | Stacked insect resistant and herbicide tolerant corn |
| MON810 | (Aventis | hybrid derived from conventional cross-breeding of the |
| | CropScience(AgrEvo)) | parental lines T25 (OECD identifier: ACS-ZMOO3-2) and |
| | | MON810 (OECD identifier: MON-OO81O-6). |
| TC1507 | Mycogen (c/o Dow | Insect-resistant and glufosinate ammonium herbicide |
| | AgroSciences); | tolerant maize produced by inserting the Cry1F gene |
| | Pioneer (c/o | from Bacillus thuringiensis var. aizawai and the |
| | DuPont) | phosphinothricin N-acetyltransferase encoding gene |
| | | from Streptomyces viridochromogenes. |
| TC1507 × | DOW | Stacked insect resistant and herbicide tolerant corn |
| NK603 | AgroSciences LLC | hybrid derived from conventional cross-breeding of the |
| | | parental lines 1507 (OECD identifier: DAS-O1507-1) |
| | | and NK603 (OECD identifier: MON-OO6O3-6). |
| TC1507 × | DOW AgroSciences | Stacked insect resistant and herbicide tolerant maize |
| DAS-59122-7 | LLC and Pioneer | produced by conventional cross breeding of parental |
| | Hi-Bred | lines TC1507 (OECD unique identifier: DAS-O15O7-1) |
| | International Inc. | with DAS-59122-7 (OECD unique identifier: DAS-59122- |
| | | 7). Resistance to Lepidopteran insects is derived from |
| | | TC1507 due the presence of the Cry1F gene from |
| | | Bacillus thuringiensis var. aizawai. Corn rootworm- |
| | | resistance is derived from DAS-59122-7 which contains |
| | | the Cry34Ab1 and Cry35Ab1 genes from Bacillus |
| | | thuringiensisstrain PS149B1. Tolerance to glufosinate |
| | | ammonium herbicide is derived from TC1507 from the |
| | | phosphinothricin N-acetyltransferase encoding gene |
| | | from Streptomyces viridochromogenes. |

[0370] Other events with regulatory approval are well known to one skilled in the art and can be found at the Center for Environmental Risk Assessment (cera-gmc.org/?action=gm_crop_database, which can be accessed using the www prefix) and at the International Service for the Acquisition of Agri-Biotech Applications (isaaa.org/gmapprovaldatabase/default.asp, which can be accessed using the www prefix).

### Gene Silencing

[0371] In some embodiments the stacked trait may be in the form of silencing of one or more polynucleotides of interest resulting in suppression of one or more target pest polypeptides. In some embodiments the silencing is achieved through the use of a suppression DNA construct. In some embodiments one or more polynucleotide encoding the polypeptides of the PtIP-83 polypeptide or fragments or variants thereof may be stacked with one or more polynucleotides encoding one or more polypeptides having insecticidal activity or agronomic traits as set forth supra and optionally may further include one or more polynucleotides providing for gene silencing of one or more target polynucleotides as discussed infra.

[0372] “Suppression DNA construct” is a recombinant DNA construct which when transformed or stably integrated into the genome of the plant, results in “silencing” of a target gene in the plant. The target gene may be endogenous or transgenic to the plant. “Silencing,” as used herein with respect to the target gene, refers generally to the suppression of levels of mRNA or protein/enzyme expressed by the target gene, and/or the level of the enzyme activity or protein functionality. The term “suppression” includes lower, reduce, decline, decrease, inhibit, eliminate and prevent. “Silencing” or “gene silencing” does not specify mechanism and is inclusive, and not limited to, anti-sense, cosuppression, viral-suppression, hairpin suppression, stem-loop suppression, RNAi-based approaches and small RNA-based approaches.

[0373] A suppression DNA construct may comprise a region derived from a target gene of interest and may comprise all or part of the nucleic acid sequence of the sense strand (or antisense strand) of the target gene of interest. Depending upon the approach to be utilized, the region may be 100% identical or less than 100% identical (e.g., at least 50% or any integer between 51% and 100% identical) to all or part of the sense strand (or antisense strand) of the gene of interest.

[0374] Suppression DNA constructs are well-known in the art, are readily constructed once the target gene of interest is selected, and include, without limitation, cosuppression constructs, antisense constructs, viral-suppression constructs, hairpin suppression constructs, stem-loop suppression constructs, double-stranded RNA-producing constructs, and more generally, RNAi (RNA interference) constructs and small RNA constructs such as siRNA (short interfering RNA) constructs and miRNA (microRNA) constructs.

[0375] “Antisense inhibition” refers to the production of antisense RNA transcripts capable of suppressing the expression of the target protein.

[0376] “Antisense RNA” refers to an RNA transcript that is complementary to all or part of a target primary transcript or mRNA and that blocks the expression of a target isolated nucleic acid fragment (U.S. Pat. No. 5,107,065). The complementarity of an antisense RNA may be with any part of the specific gene transcript, i.e., at the 5′ non-coding sequence, 3′ non-coding sequence, introns or the coding sequence.

[0377] “Cosuppression” refers to the production of sense RNA transcripts capable of suppressing the expression of the target protein. “Sense” RNA refers to RNA transcript that includes the mRNA and can be translated into protein within a cell or in vitro. Cosuppression constructs in plants have been previously designed by focusing on overexpression of a nucleic acid sequence having homology to a native mRNA, in the sense orientation, which results in the reduction of all RNA having homology to the overexpressed sequence (see, Vaucheret, et al., (1998) Plant J. 16:651-659 and Gura, (2000) Nature 404:804-808).

[0378] Another variation describes the use of plant viral sequences to direct the suppression of proximal mRNA encoding sequences (PCT Publication WO 1998/36083).

[0379] Recent work has described the use of “hairpin” structures that incorporate all or part, of an mRNA encoding sequence in a complementary orientation that results in a potential “stem-loop” structure for the expressed RNA (PCT Publication WO 1999/53050). In this case the stem is formed by polynucleotides corresponding to the gene of interest inserted in either sense or anti-sense orientation with respect to the promoter and the loop is formed by some polynucleotides of the gene of interest, which do not have a complement in the construct. This increases the frequency of cosuppression or silencing in the recovered transgenic plants. For review of hairpin suppression, see, Wesley, et al., (2003) Methods in Molecular Biology, Plant Functional Genomics: Methods and Protocols 236:273-286.

[0380] A construct where the stem is formed by at least 30 nucleotides from a gene to be suppressed and the loop is formed by a random nucleotide sequence has also effectively been used for suppression (PCT Publication WO 1999/61632).

[0381] The use of poly-T and poly-A sequences to generate the stem in the stem-loop structure has also been described (PCT Publication WO 2002/00894).

[0382] Yet another variation includes using synthetic repeats to promote formation of a stem in the stem-loop structure. Transgenic organisms prepared with such recombinant DNA fragments have been shown to have reduced levels of the protein encoded by the nucleotide fragment forming the loop as described in PCT Publication WO 2002/00904.

[0383] RNA interference refers to the process of sequence-specific post-transcriptional gene silencing in animals mediated by short interfering RNAs (siRNAs) (Fire, et al., (1998) Nature 391:806). The corresponding process in plants is commonly referred to as post-transcriptional gene silencing (PTGS) or RNA silencing and is also referred to as quelling in fungi. The process of post-transcriptional gene silencing is thought to be an evolutionarily-conserved cellular defense mechanism used to prevent the expression of foreign genes and is commonly shared by diverse flora and phyla (Fire, et al., (1999) Trends Genet. 15:358). Such protection from foreign gene expression may have evolved in response to the production of double-stranded RNAs (dsRNAs) derived from viral infection or from the random integration of transposon elements into a host genome via a cellular response that specifically destroys homologous single-stranded RNA of viral genomic RNA. The presence of dsRNA in cells triggers the RNAi response through a mechanism that has yet to be fully characterized.

[0384] The presence of long dsRNAs in cells stimulates the activity of a ribonuclease III enzyme referred to as dicer. Dicer is involved in the processing of the dsRNA into short pieces of dsRNA known as short interfering RNAs (siRNAs) (Berstein, et al., (2001) Nature 409:363). Short interfering RNAs derived from dicer activity are typically about 21 to about 23 nucleotides in length and comprise about 19 base pair duplexes (Elbashir, et al., (2001) Genes Dev. 15:188). Dicer has also been implicated in the excision of 21- and 22-nucleotide small temporal RNAs (stRNAs) from precursor RNA of conserved structure that are implicated in translational control (Hutvagner, et al., (2001) Science 293:834). The RNAi response also features an endonuclease complex, commonly referred to as an RNA-induced silencing complex (RISC), which mediates cleavage of single-stranded RNA having sequence complementarity to the antisense strand of the siRNA duplex. Cleavage of the target RNA takes place in the middle of the region complementary to the antisense strand of the siRNA duplex (Elbashir, et al., (2001) Genes Dev. 15:188). In addition, RNA interference can also involve small RNA (e.g., miRNA) mediated gene silencing, presumably through cellular mechanisms that regulate chromatin structure and thereby prevent transcription of target gene sequences (see, e.g., Allshire, (2002) Science 297:1818-1819; Volpe, et al., (2002) Science 297:1833-1837; Jenuwein, (2002) Science 297:2215-2218 and Hall, et al., (2002) Science 297:2232-2237). As such, miRNA molecules of the disclosure can be used to mediate gene silencing via interaction with RNA transcripts or alternately by interaction with particular gene sequences, wherein such interaction results in gene silencing either at the transcriptional or post-transcriptional level.

[0385] Methods and compositions are further provided which allow for an increase in RNAi produced from the silencing element. In such embodiments, the methods and compositions employ a first polynucleotide comprising a silencing element for a target pest sequence operably linked to a promoter active in the plant cell; and, a second polynucleotide comprising a suppressor enhancer element comprising the target pest sequence or an active variant or fragment thereof operably linked to a promoter active in the plant cell. The combined expression of the silencing element with suppressor enhancer element leads to an increased amplification of the inhibitory RNA produced from the silencing element over that achievable with only the expression of the silencing element alone. In addition to the increased amplification of the specific RNAi species itself, the methods and compositions further allow for the production of a diverse population of RNAi species that can enhance the effectiveness of disrupting target gene expression. As such, when the suppressor enhancer element is expressed in a plant cell in combination with the silencing element, the methods and composition can allow for the systemic production of RNAi throughout the plant; the production of greater amounts of RNAi than would be observed with just the silencing element construct alone; and, the improved loading of RNAi into the phloem of the plant, thus providing better control of phloem feeding insects by an RNAi approach. Thus, the various methods and compositions provide improved methods for the delivery of inhibitory RNA to the target organism. See, for example, US Patent Application Publication 2009/0188008.

[0386] As used herein, a “suppressor enhancer element” comprises a polynucleotide comprising the target sequence to be suppressed or an active fragment or variant thereof. It is recognize that the suppressor enhancer element need not be identical to the target sequence, but rather, the suppressor enhancer element can comprise a variant of the target sequence, so long as the suppressor enhancer element has sufficient sequence identity to the target sequence to allow for an increased level of the RNAi produced by the silencing element over that achievable with only the expression of the silencing element. Similarly, the suppressor enhancer element can comprise a fragment of the target sequence, wherein the fragment is of sufficient length to allow for an increased level of the RNAi produced by the silencing element over that achievable with only the expression of the silencing element.

[0387] It is recognized that multiple suppressor enhancer elements from the same target sequence or from different target sequences or from different regions of the same target sequence can be employed. For example, the suppressor enhancer elements employed can comprise fragments of the target sequence derived from different region of the target sequence (i.e., from the 3′UTR, coding sequence, intron, and/or 5′UTR). Further, the suppressor enhancer element can be contained in an expression cassette, as described elsewhere herein, and in specific embodiments, the suppressor enhancer element is on the same or on a different DNA vector or construct as the silencing element. The suppressor enhancer element can be operably linked to a promoter as disclosed herein. It is recognized that the suppressor enhancer element can be expressed constitutively or alternatively, it may be produced in a stage-specific manner employing the various inducible or tissue-preferred or developmentally regulated promoters that are discussed elsewhere herein.

[0388] In specific embodiments, employing both a silencing element and the suppressor enhancer element the systemic production of RNAi occurs throughout the entire plant. In further embodiments, the plant or plant parts of the disclosure have an improved loading of RNAi into the phloem of the plant than would be observed with the expression of the silencing element construct alone and, thus provide better control of phloem feeding insects by an RNAi approach. In specific embodiments, the plants, plant parts and plant cells of the disclosure can further be characterized as allowing for the production of a diversity of RNAi species that can enhance the effectiveness of disrupting target gene expression.

[0389] In specific embodiments, the combined expression of the silencing element and the suppressor enhancer element increases the concentration of the inhibitory RNA in the plant cell, plant, plant part, plant tissue or phloem over the level that is achieved when the silencing element is expressed alone.

[0390] As used herein, an “increased level of inhibitory RNA” comprises any statistically significant increase in the level of RNAi produced in a plant having the combined expression when compared to an appropriate control plant. For example, an increase in the level of RNAi in the plant, plant part or the plant cell can comprise at least about a 1%, about a 1%-5%, about a 5%-10%, about a 10%-20%, about a 20%-30%, about a 30%-40%, about a 40%-50%, about a 50%-60%, about 60-70%, about 70%-80%, about a 80%-90%, about a 90%-100% or greater increase in the level of RNAi in the plant, plant part, plant cell or phloem when compared to an appropriate control. In other embodiments, the increase in the level of RNAi in the plant, plant part, plant cell or phloem can comprise at least about a 1 fold, about a 1 fold-5 fold, about a 5 fold-10 fold, about a 10 fold-20 fold, about a 20 fold-30 fold, about a 30 fold-40 fold, about a 40 fold-50 fold, about a 50 fold-60 fold, about 60 fold-70 fold, about 70 fold-80 fold, about a 80 fold-90 fold, about a 90 fold-100 fold or greater increase in the level of RNAi in the plant, plant part, plant cell or phloem when compared to an appropriate control. Examples of combined expression of the silencing element with suppressor enhancer element for the control of Stinkbugs and Lygus can be found in US Patent Application Publication 2011/0301223 and US Patent Application Publication 2009/0192117.

[0391] Some embodiments relate to down-regulation of expression of target genes in insect pest species by interfering ribonucleic acid (RNA) molecules. PCT Publication WO 2007/074405 describes methods of inhibiting expression of target genes in invertebrate pests including Colorado potato beetle. PCT Publication WO 2005/110068 describes methods of inhibiting expression of target genes in invertebrate pests including in particular Western corn rootworm as a means to control insect infestation. Furthermore, PCT Publication WO 2009/091864 describes compositions and methods for the suppression of target genes from insect pest species including pests from the Lygus genus. Nucleic acid molecules including RNAi for targeting the vacuolar ATPase H subunit, useful for controlling a coleopteran pest population and infestation as described in US Patent Application Publication 2012/0198586. PCT Publication WO 2012/055982 describes ribonucleic acid (RNA or double stranded RNA) that inhibits or down regulates the expression of a target gene that encodes: an insect ribosomal protein such as the ribosomal protein L19, the ribosomal protein L40 or the ribosomal protein S27A; an insect proteasome subunit such as the Rpn6 protein, the Pros 25, the Rpn2 protein, the proteasome beta 1 subunit protein or the Pros beta 2 protein; an insect β-coatomer of the COPI vesicle, the γ-coatomer of the COPI vesicle, the β′-coatomer protein or the ζ-coatomer of the COPI vesicle; an insect Tetraspanine 2 A protein which is a putative transmembrane domain protein; an insect protein belonging to the actin family such as Actin 5C; an insect ubiquitin-5E protein; an insect Sec23 protein which is a GTPase activator involved in intracellular protein transport; an insect crinkled protein which is an unconventional myosin which is involved in motor activity; an insect crooked neck protein which is involved in the regulation of nuclear alternative mRNA splicing; an insect vacuolar H+-ATPase G-subunit protein and an insect Tbp-1 such as Tat-binding protein. US Patent Application Publications 2012/029750, US 20120297501, and 2012/0322660 describe interfering ribonucleic acids (RNA or double stranded RNA) that functions upon uptake by an insect pest species to down-regulate expression of a target gene in said insect pest, wherein the RNA comprises at least one silencing element wherein the silencing element is a region of double-stranded RNA comprising annealed complementary strands, one strand of which comprises or consists of a sequence of nucleotides which is at least partially complementary to a target nucleotide sequence within the target gene. US Patent Application Publication 2012/0164205 describe potential targets for interfering double stranded ribonucleic acids for inhibiting invertebrate pests including: a Chd3 Homologous Sequence, a Beta-Tubulin Homologous Sequence, a 40 kDa V-ATPase Homologous Sequence, a EF1a Homologous Sequence, a 26S Proteosome Subunit p28 Homologous Sequence, a Juvenile Hormone Epoxide Hydrolase Homologous Sequence, a Swelling Dependent Chloride Channel Protein Homologous Sequence, a Glucose-6-Phosphate 1-Dehydrogenase Protein Homologous Sequence, an Act42A Protein Homologous Sequence, a ADP-Ribosylation Factor 1 Homologous Sequence, a Transcription Factor IIB Protein Homologous Sequence, a Chitinase Homologous Sequences, a Ubiquitin Conjugating Enzyme Homologous Sequence, a Glyceraldehyde-3-Phosphate Dehydrogenase Homologous Sequence, an Ubiquitin B Homologous Sequence, a Juvenile Hormone Esterase Homolog, and an Alpha Tubuliln Homologous Sequence.

### Use in Pesticidal Control

[0392] General methods for employing strains comprising a nucleic acid sequence of the embodiments or a variant thereof, in pesticide control or in engineering other organisms as pesticidal agents are known in the art. See, for example U.S. Pat. No. 5,039,523 and EP 0480762A2.

[0393] Microorganism hosts that are known to occupy the “phytosphere” (phylloplane, phyllosphere, rhizosphere, and/or rhizoplana) of one or more crops of interest may be selected. These microorganisms are selected so as to be capable of successfully competing in the particular environment with the wild-type microorganisms, provide for stable maintenance and expression of the gene expressing the PtIP-83 polypeptide and desirably provide for improved protection of the pesticide from environmental degradation and inactivation.

[0394] Such microorganisms include bacteria, algae, and fungi. Of particular interest are microorganisms such as bacteria, e.g., Pseudomonas, Erwinia, Serratia, Klebsiella, Xanthomonas, Streptomyces, Rhizobium, Rhodopseudomonas, Methylius, Agrobacterium, Acetobacter, Lactobacillus, Arthrobacter, Azotobacter, Leuconostoc, and Alcaligenes, fungi, particularly yeast, e.g., Saccharomyces, Cryptococcus, Kluyveromyces, Sporobolomyces, Rhodotorula, and Aureobasidium. Of particular interest are such phytosphere bacterial species as Pseudomonas syringae, Pseudomonas fluorescens, Pseudomonas chlororaphis, Serratia marcescens, Acetobacter xylinum, Agrobacteria, Rhodopseudomonas spheroides, Xanthomonas campestris, Rhizobium melioti, Alcaligenes entrophus, Clavibacter xyli and Azotobacter vinelandii and phytosphere yeast species such as Rhodotorula rubra, R. glutinis, R. marina, R. aurantiaca, Cryptococcus albidus, C. diffluens, C. laurentii, Saccharomyces rosei, S. pretoriensis, S. cerevisiae, Sporobolomyces roseus, S. odorus, Kluyveromyces veronae, and Aureobasidium pollulans. Of particular interest are the pigmented microorganisms. Host organisms of particular interest include yeast, such as Rhodotorula spp., Aureobasidium spp., Saccharomyces spp. (such as S. cerevisiae), Sporobolomyces spp., phylloplane organisms such as Pseudomonas spp. (such as P. aeruginosa, P. fluorescens, P. chlororaphis), Erwinia spp., and Flavobacterium spp., and other such organisms, including Agrobacterium tumefaciens, E. coli, Bacillus subtilis, Bacillus cereus and the like.

[0395] Genes encoding the PtIP-83 polypeptide of the embodiments can be introduced into microorganisms that multiply on plants (epiphytes) to deliver PtIP-83 polypeptide to potential target pests. Epiphytes, for example, can be gram-positive or gram-negative bacteria.

[0396] Root-colonizing bacteria, for example, can be isolated from the plant of interest by methods known in the art. Specifically, a Bacillus cereus strain that colonizes roots can be isolated from roots of a plant (see, for example, Handelsman et al. (1991) Appl. Environ. Microbiol. 56:713-718). Genes encoding the PtIP-83 polypeptide of the embodiments can be introduced into a root-colonizing Bacillus cereus by standard methods known in the art.

[0397] Genes encoding PtIP-83 polypeptides can be introduced, for example, into the root-colonizing Bacillus by means of electro transformation. Specifically, genes encoding the PtIP-83 polypeptides can be cloned into a shuttle vector, for example, pHT3101 (Lerecius, et al., (1989) FEMS Microbiol. Letts. 60:211-218. The shuttle vector pHT3101 containing the coding sequence for the particular PtIP-83 polypeptide gene can, for example, be transformed into the root-colonizing Bacillus by means of electroporation (Lerecius, et al., (1989) FEMS Microbiol. Letts. 60:211-218).

[0398] Expression systems can be designed so that PtIP-83 polypeptides are secreted outside the cytoplasm of gram-negative bacteria, such as E. coli, for example. Advantages of having a PtIP-83 polypeptide secreted are: (1) avoidance of potential cytotoxic effects of the PtIP-83 polypeptide expressed; and (2) improvement in the efficiency of purification of the PtIP-83 polypeptide, including, but not limited to, increased efficiency in the recovery and purification of the protein per volume cell broth and decreased time and/or costs of recovery and purification per unit protein.

[0399] PtIP-83 polypeptides can be made to be secreted in E. coli, for example, by fusing an appropriate E. coli signal peptide to the amino-terminal end of the PtIP-83 polypeptide. Signal peptides recognized by E. coli can be found in proteins already known to be secreted in E. coli, for example the OmpA protein (Ghrayeb, et al., (1984) EMBO J, 3:2437-2442). OmpA is a major protein of the E. coli outer membrane, and thus its signal peptide is thought to be efficient in the translocation process. Also, the OmpA signal peptide does not need to be modified before processing as may be the case for other signal peptides, for example lipoprotein signal peptide (Duffaud, et al., (1987) Meth. Enzymol. 153:492).

[0400] PtIP-83 polypeptides of the embodiments can be fermented in a bacterial host and the resulting bacteria processed and used as a microbial spray in the same manner that Bt strains have been used as insecticidal sprays. In the case of a PtIP-83 polypeptide(sthat is secreted from Bacillus, the secretion signal is removed or mutated using procedures known in the art. Such mutations and/or deletions prevent secretion of the PtIP-83 polypeptide(s) into the growth medium during the fermentation process. The PtIP-83 polypeptide is retained within the cell, and the cells are then processed to yield the encapsulated PtIP-83 polypeptide. Any suitable microorganism can be used for this purpose. Pseudomonas has been used to express Bt toxins as encapsulated proteins and the resulting cells processed and sprayed as an insecticide (Gaertner, et al., (1993), in: Advanced Engineered Pesticides, ed. Kim).

[0401] Alternatively, the PtIP-83 polypeptide is produced by introducing a heterologous gene into a cellular host. Expression of the heterologous gene results, directly or indirectly, in the intracellular production and maintenance of the pesticide. These cells are then treated under conditions that prolong the activity of the toxin produced in the cell when the cell is applied to the environment of target pest(s). The resulting product retains the toxicity of the toxin. These naturally encapsulated PtIP-83 polypeptide may then be formulated in accordance with conventional techniques for application to the environment hosting a target pest, e.g., soil, water, and foliage of plants. See, for example EPA 0192319, and the references cited therein.

### Pesticidal Compositions

[0402] In some embodiments the active ingredients can be applied in the form of compositions and can be applied to the crop area or plant to be treated, simultaneously or in succession, with other compounds. These compounds can be fertilizers, weed killers, Cryoprotectants, surfactants, detergents, pesticidal soaps, dormant oils, polymers, and/or time-release or biodegradable carrier formulations that permit long-term dosing of a target area following a single application of the formulation. They can also be selective herbicides, chemical insecticides, virucides, microbicides, amoebicides, pesticides, fungicides, bacteriocides, nematocides, molluscicides or mixtures of several of these preparations, if desired, together with further agriculturally acceptable carriers, surfactants or application-promoting adjuvants customarily employed in the art of formulation. Suitable carriers and adjuvants can be solid or liquid and correspond to the substances ordinarily employed in formulation technology, e.g. natural or regenerated mineral substances, solvents, dispersants, wetting agents, tackifiers, binders or fertilizers. Likewise the formulations may be prepared into edible “baits” or fashioned into pest “traps” to permit feeding or ingestion by a target pest of the pesticidal formulation.

[0403] Methods of applying an active ingredient or an agrochemical composition that contains at least one of the PtIP-83 polypeptide produced by the bacterial strains include leaf application, seed coating and soil application. The number of applications and the rate of application depend on the intensity of infestation by the corresponding pest.

[0404] The composition may be formulated as a powder, dust, pellet, granule, spray, emulsion, colloid, solution or such like, and may be prepared by such conventional means as desiccation, lyophilization, homogenation, extraction, filtration, centrifugation, sedimentation or concentration of a culture of cells comprising the polypeptide. In all such compositions that contain at least one such pesticidal polypeptide, the polypeptide may be present in a concentration of from about 1% to about 99% by weight.

[0405] Lepidopteran, Dipteran, Heteropteran, nematode, Hemiptera or Coleopteran pests may be killed or reduced in numbers in a given area by the methods of the disclosure or may be prophylactically applied to an environmental area to prevent infestation by a susceptible pest. Preferably the pest ingests or is contacted with, a pesticidally-effective amount of the polypeptide. “Pesticidally-effective amount” as used herein refers to an amount of the pesticide that is able to bring about death to at least one pest or to noticeably reduce pest growth, feeding or normal physiological development. This amount will vary depending on such factors as, for example, the specific target pests to be controlled, the specific environment, location, plant, crop or agricultural site to be treated, the environmental conditions and the method, rate, concentration, stability, and quantity of application of the pesticidally-effective polypeptide composition. The formulations may also vary with respect to climatic conditions, environmental considerations, and/or frequency of application and/or severity of pest infestation.

[0406] The pesticide compositions described may be made by formulating either the bacterial cell, Crystal and/or spore suspension or isolated protein component with the desired agriculturally-acceptable carrier. The compositions may be formulated prior to administration in an appropriate means such as lyophilized, freeze-dried, desiccated or in an aqueous carrier, medium or suitable diluent, such as saline or other buffer. The formulated compositions may be in the form of a dust or granular material or a suspension in oil (vegetable or mineral) or water or oil/water emulsions or as a wettable powder or in combination with any other carrier material suitable for agricultural application. Suitable agricultural carriers can be solid or liquid and are well known in the art. The term “agriculturally-acceptable carrier” covers all adjuvants, inert components, dispersants, surfactants, tackifiers, binders, etc. that are ordinarily used in pesticide formulation technology; these are well known to those skilled in pesticide formulation. The formulations may be mixed with one or more solid or liquid adjuvants and prepared by various means, e.g., by homogeneously mixing, blending and/or grinding the pesticidal composition with suitable adjuvants using conventional formulation techniques. Suitable formulations and application methods are described in U.S. Pat. No. 6,468,523, herein incorporated by reference. The plants can also be treated with one or more chemical compositions, including one or more herbicide, insecticides or fungicides. Exemplary chemical compositions include: Fruits/Vegetables Herbicides: Atrazine, Bromacil, Diuron, Glyphosate, Linuron, Metribuzin, Simazine, Trifluralin, Fluazifop, Glufosinate, Halo sulfuron Gowan, Paraquat, Propyzamide, Sethoxydim, Butafenacil, Halosulfuron, Indaziflam; Fruits/Vegetables Insecticides: Aldicarb, Bacillus thuriengiensis, Carbaryl, Carbofuran, Chlorpyrifos, Cypermethrin, Deltamethrin, Diazinon, Malathion, Abamectin, Cyfluthrin/beta-cyfluthrin, Esfenvalerate, Lambda-cyhalothrin, Acequinocyl, Bifenazate, Methoxyfenozide, Novaluron, Chromafenozide, Thiacloprid, Dinotefuran, FluaCrypyrim, Tolfenpyrad, Clothianidin, Spirodiclofen, Gamma-cyhalothrin, Spiromesifen, Spinosad, Rynaxypyr, Cyazypyr, Spinoteram, Triflumuron, Spirotetramat, Imidacloprid, Flubendiamide, Thiodicarb, Metaflumizone, Sulfoxaflor, Cyflumetofen, Cyanopyrafen, Imidacloprid, Clothianidin, Thiamethoxam, Spinotoram, Thiodicarb, Flonicamid, Methiocarb, Emamectin-benzoate, Indoxacarb, Forthiazate, Fenamiphos, Cadusaphos, Pyriproxifen, Fenbutatin-oxid, Hexthiazox, Methomyl, 4-[[(6-Chlorpyridin-3-yl)methyl](2,2-difluorethyl)amino]furan-2(5H)-on; Fruits/Vegetables Fungicides: Carbendazim, Chlorothalonil, EBDCs, Sulphur, Thiophanate-methyl, Azoxystrobin, Cymoxanil, Fluazinam, Fosetyl, Iprodione, Kresoxim-methyl, Metalaxyl/mefenoxam, Trifloxystrobin, Ethaboxam, I provalicarb, Trifloxystrobin, Fenhexamid, Oxpoconazole fumarate, Cyazofamid, Fenamidone, Zoxamide, Picoxystrobin, Pyraclostrobin, Cyflufenamid, Boscalid; Cereals Herbicides: Isoproturon, Bromoxynil, Ioxynil, Phenoxies, Chlorsulfuron, Clodinafop, Diclofop, Diflufenican, Fenoxaprop, Florasulam, Fluoroxypyr, Metsulfuron, Triasulfuron, Flucarbazone, Iodosulfuron, Propoxycarbazone, Picolinafen, Mesosulfuron, Beflubutamid, Pinoxaden, Amidosulfuron, Thifensulfuron Methyl, Tribenuron, Flupyrsulfuron, Sulfosulfuron, Pyrasulfotole, Pyroxsulam, Flufenacet, Tralkoxydim, Pyroxasulfon; Cereals Fungicides: Carbendazim, Chlorothalonil, Azoxystrobin, Cyproconazole, Cyprodinil, Fenpropimorph, Epoxiconazole, Kresoxim-methyl, Quinoxyfen, Tebuconazole, Trifloxystrobin, Simeconazole, Picoxystrobin, Pyraclostrobin, Dimoxystrobin, Prothioconazole, Fluoxastrobin; Cereals Insecticides: Dimethoate, Lambda-cyhalthrin, Deltamethrin, alpha-Cypermethrin, β-cyfluthrin, Bifenthrin, Imidacloprid, Clothianidin, Thiamethoxam, Thiacloprid, Acetamiprid, Dinetofuran, Clorphyriphos, Metamidophos, Oxidemethon-methyl, Pirimicarb, Methiocarb; Maize Herbicides: Atrazine, Alachlor, Bromoxynil, Acetochlor, Dicamba, Clopyralid, (S-) Dimethenamid, Glufosinate, Glyphosate, Isoxaflutole, (S-)Metolachlor, Mesotrione, Nicosulfuron, Primisulfuron, Rimsulfuron, Sulcotrione, Foramsulfuron, Topramezone, Tembotrione, Saflufenacil, Thiencarbazone, Flufenacet, Pyroxasulfon; Maize Insecticides: Carbofuran, Chlorpyrifos, Bifenthrin, Fipronil, Imidacloprid, Lambda-Cyhalothrin, Tefluthrin, Terbufos, Thiamethoxam, Clothianidin, Spiromesifen, Flubendiamide, Triflumuron, Rynaxypyr, Deltamethrin, Thiodicarb, β-Cyfluthrin, Cypermethrin, Bifenthrin, Lufenuron, Triflumoron, Tefluthrin, Tebupirimphos, Ethiprole, Cyazypyr, Thiacloprid, Acetamiprid, Dinetofuran, Avermectin, Methiocarb, Spirodiclofen, Spirotetramat; Maize Fungicides: Fenitropan, Thiram, Prothioconazole, Tebuconazole, Trifloxystrobin; Rice Herbicides: Butachlor, Propanil, Azimsulfuron, Bensulfuron, Cyhalofop, Daimuron, Fentrazamide, Imazosulfuron, Mefenacet, Oxaziclomefone, Pyrazosulfuron, Pyributicarb, Quinclorac, Thiobencarb, Indanofan, Flufenacet, Fentrazamide, Halosulfuron, Oxaziclomefone, Benzobicyclon, Pyriftalid, Penoxsulam, Bispyribac, Oxadiargyl, Ethoxysulfuron, Pretilachlor, Mesotrione, Tefuryltrione, Oxadiazone, Fenoxaprop, Pyrimisulfan; Rice Insecticides: Diazinon, Fenitrothion, Fenobucarb, Monocrotophos, Benfuracarb, Buprofezin, Dinotefuran, Fipronil, Imidacloprid, Isoprocarb, Thiacloprid, Chromafenozide, Thiacloprid, Dinotefuran, Clothianidin, Ethiprole, Flubendiamide, Rynaxypyr, Deltamethrin, Acetamiprid, Thiamethoxam, Cyazypyr, Spinosad, Spinotoram, Emamectin-Benzoate, Cypermethrin, Chlorpyriphos, Cartap, Methamidophos, Etofenprox, Triazophos, 4-[[(6-Chlorpyridin-3-yl)methyl](2,2-difluorethyl)amino]furan-2(5H)-on, Carbofuran, Benfuracarb; Rice Fungicides: Thiophanate-methyl, Azoxystrobin, Carpropamid, Edifenphos, Ferimzone, Iprobenfos, Isoprothiolane, Pencycuron, Probenazole, Pyroquilon, Tricyclazole, Trifloxystrobin, Diclocymet, Fenoxanil, Simeconazole, Tiadinil; Cotton Herbicides: Diuron, Fluometuron, MSMA, Oxyfluorfen, Prometryn, Trifluralin, Carfentrazone, Clethodim, Fluazifop-butyl, Glyphosate, Norflurazon, Pendimethalin, Pyrithiobac-sodium, Trifloxysulfuron, Tepraloxydim, Glufosinate, Flumioxazin, Thidiazuron; Cotton Insecticides: Acephate, Aldicarb, Chlorpyrifos, Cypermethrin, Deltamethrin, Malathion, Monocrotophos, Abamectin, Acetamiprid, Emamectin Benzoate, Imidacloprid, Indoxacarb, Lambda-Cyhalothrin, Spinosad, Thiodicarb, Gamma-Cyhalothrin, Spiromesifen, Pyridalyl, Flonicamid, Flubendiamide, Triflumuron, Rynaxypyr, Beta-Cyfluthrin, Spirotetramat, Clothianidin, Thiamethoxam, Thiacloprid, Dinetofuran, Flubendiamide, Cyazypyr, Spinosad, Spinotoram, gamma Cyhalothrin, 4-[[(6-Chlorpyridin-3-yl)methyl](2,2-difluorethyl)amino]furan-2(5H)-on, Thiodicarb, Avermectin, Flonicamid, Pyridalyl, Spiromesifen, Sulfoxaflor, Profenophos, Thriazophos, Endosulfan; Cotton Fungicides: Etridiazole, Metalaxyl, Quintozene; Soybean Herbicides: Alachlor, Bentazone, Trifluralin, Chlorimuron-Ethyl, Cloransulam-Methyl, Fenoxaprop, Fomesafen, Fluazifop, Glyphosate, Imazamox, Imazaquin, Imazethapyr, (S-)Metolachlor, Metribuzin, Pendimethalin, Tepraloxydim, Glufosinate; Soybean Insecticides: Lambda-cyhalothrin, Methomyl, Parathion, Thiocarb, Imidacloprid, Clothianidin, Thiamethoxam, Thiacloprid, Acetamiprid, Dinetofuran, Flubendiamide, Rynaxypyr, Cyazypyr, Spinosad, Spinotoram, Emamectin-Benzoate, Fipronil, Ethiprole, Deltamethrin, β-Cyfluthrin, gamma and lambda Cyhalothrin, 4-[[(6-Chlorpyridin-3-yl)methyl](2,2-difluorethyl)amino]furan-2(5H)-on, Spirotetramat, Spinodiclofen, Triflumuron, Flonicamid, Thiodicarb, beta-Cyfluthrin; Soybean Fungicides: Azoxystrobin, Cyproconazole, Epoxiconazole, Flutriafol, Pyraclostrobin, Tebuconazole, Trifloxystrobin, Prothioconazole, Tetraconazole; Sugarbeet Herbicides: Chloridazon, Desmedipham, Ethofumesate, Phenmedipham, Triallate, Clopyralid, Fluazifop, Lenacil, Metamitron, Quinmerac, Cycloxydim, Triflusulfuron, Tepraloxydim, Quizalofop; Sugarbeet Insecticides: Imidacloprid, Clothianidin, Thiamethoxam, Thiacloprid, Acetamiprid, Dinetofuran, Deltamethrin, β-Cyfluthrin, gamma/lambda Cyhalothrin, 4-[[(6-Chlorpyridin-3-yl)methyl](2,2-difluorethyl)amino]furan-2(5H)-on, Tefluthrin, Rynaxypyr, Cyaxypyr, Fipronil, Carbofuran; Canola Herbicides: Clopyralid, Diclofop, Fluazifop, Glufosinate, Glyphosate, Metazachlor, Trifluralin Ethametsulfuron, Quinmerac, Quizalofop, Clethodim, Tepraloxydim; Canola Fungicides: Azoxystrobin, Carbendazim, Fludioxonil, Iprodione, Prochloraz, Vinclozolin; Canola Insecticides: Carbofuran organophosphates, Pyrethroids, Thiacloprid, Deltamethrin, Imidacloprid, Clothianidin, Thiamethoxam, Acetamiprid, Dinetofuran, β-Cyfluthrin, gamma and lambda Cyhalothrin, tau-Fluvaleriate, Ethiprole, Spinosad, Spinotoram, Flubendiamide, Rynaxypyr, Cyazypyr, 4-[[(6-Chlorpyridin-3-yl)methyl](2,2-difluorethyl)amino]furan-2(5H)-on.

[0407] In some embodiments the herbicide is Atrazine, Bromacil, Diuron, Chlorsulfuron, Metsulfuron, Thifensulfuron Methyl, Tribenuron, Acetochlor, Dicamba, Isoxaflutole, Nicosulfuron, Rimsulfuron, Pyrithiobac-sodium, Flumioxazin, Chlorimuron-Ethyl, Metribuzin, Quizalofop, S-metolachlor, Hexazinne or combinations thereof.

[0408] In some embodiments the insecticide is Esfenvalerate, Chlorantraniliprole, Methomyl, Indoxacarb, Oxamyl or combinations thereof.

### Pesticidal and Insecticidal Activity

[0409] “Pest” includes but is not limited to, insects, fungi, bacteria, nematodes, mites, ticks and the like. Insect pests include insects selected from the orders Coleoptera, Diptera, Hymenoptera, Lepidoptera, Mallophaga, Homoptera, Hemiptera Orthroptera, Thysanoptera, Dermaptera, Isoptera, Anoplura, Siphonaptera, Trichoptera, etc., particularly Lepidoptera and Coleoptera.

[0410] Those skilled in the art will recognize that not all compounds are equally effective against all pests. Compounds of the embodiments display activity against insect pests, which may include economically important agronomic, forest, greenhouse, nursery ornamentals, food and fiber, public and animal health, domestic and commercial structure, household and stored product pests.

[0411] Larvae of the order Lepidoptera include, but are not limited to, armyworms, cutworms, loopers and heliothines in the family Noctuidae Spodoptera frugiperda J E Smith (fall armyworm); S. exigua Hübner (beet armyworm); S. litura Fabricius (tobacco cutworm, cluster caterpillar); Mamestra configurata Walker (bertha armyworm); M. brassicae Linnaeus (cabbage moth); Agrotis ipsilon Hufnagel (black cutworm); A. orthogonia Morrison (western cutworm); A. subterranea Fabricius (granulate cutworm); Alabama argillacea Hübner (cotton leaf worm); Trichoplusia ni Hübner (cabbage looper); Pseudoplusia includens Walker (soybean looper); Anticarsia gemmatalis Hübner (velvetbean caterpillar); Hypena scabra Fabricius (green cloverworm); Heliothis virescens Fabricius (tobacco budworm); Pseudaletia unipuncta Haworth (armyworm); Athetis mindara Barnes and Mcdunnough (rough skinned cutworm); Euxoa messoria Harris (darksided cutworm); Earias insulana Boisduval (spiny bollworm); E. vittella Fabricius (spotted bollworm); Helicoverpa armigera Hübner (American bollworm); H. zea Boddie (corn earworm or cotton bollworm); Melanchra picta Harris (zebra caterpillar); Egira (Xylomyges) curialis Grote (citrus cutworm); borers, casebearers, webworms, coneworms, and skeletonizers from the family Pyralidae Ostrinia nubilalis Hübner (European corn borer); Amyelois transitella Walker (naval orangeworm); Anagasta kuehniella Zeller (Mediterranean flour moth); Cadra cautella Walker (almond moth); Chilo suppressalis Walker (rice stem borer); C. partellus, (sorghum borer); Corcyra cephalonica Stainton (rice moth); Crambus caliginosellus Clemens (corn root webworm); C. teterrellus Zincken (bluegrass webworm); Cnaphalocrocis medinalis Guenée (rice leaf roller); Desmia funeralis Hübner (grape leaffolder); Diaphania hyalinata Linnaeus (melon worm); D. nitidalis Stoll (pickleworm); Diatraea grandiosella Dyar (southwestern corn borer), D. saccharalis Fabricius (surgarcane borer); Eoreuma loftini Dyar (Mexican rice borer); Ephestia elutella Hübner (tobacco (cacao) moth); Galleria mellonella Linnaeus (greater wax moth); Herpetogramma licarsisalis Walker (sod webworm); Homoeosoma electellum Hulst (sunflower moth); Elasmopalpus lignosellus Zeller (lesser cornstalk borer); Achroia grisella Fabricius (lesser wax moth); Loxostege sticticalis Linnaeus (beet webworm); Orthaga thyrisalis Walker (tea tree web moth); Maruca testulalis Geyer (bean pod borer); Plodia interpunctella Hübner (Indian meal moth); Scirpophaga incertulas Walker (yellow stem borer); Udea rubigalis Guenée (celery leaftier); and leafrollers, budworms, seed worms and fruit worms in the family Tortricidae Acleris gloverana Walsingham (Western blackheaded budworm); A. variana Fernald (Eastern blackheaded budworm); Archips argyrospila Walker (fruit tree leaf roller); A. rosana Linnaeus (European leaf roller); and other Archips species, Adoxophyes orana Fischer von Rösslerstamm (summer fruit tortrix moth); Cochylis hospes Walsingham (banded sunflower moth); Cydia latiferreana Walsingham (filbertworm); C. pomonella Linnaeus (coding moth); Platynota flavedana Clemens (variegated leafroller); P. stultana Walsingham (omnivorous leafroller); Lobesia botrana Denis & Schiffermüller (European grape vine moth); Spilonota ocellana Denis & Schiffermüller (eyespotted bud moth); Endopiza viteana Clemens (grape berry moth); Eupoecilia ambiguella Hübner (vine moth); Bonagota salubricola Meyrick (Brazilian apple leafroller); Grapholita molesta Busck (oriental fruit moth); Suleima helianthana Riley (sunflower bud moth); Argyrotaenia spp.; Choristoneura spp.

[0412] Selected other agronomic pests in the order Lepidoptera include, but are not limited to, Alsophila pometaria Harris (fall cankerworm); Anarsia lineatella Zeller (peach twig borer); Anisota senatoria J. E. Smith (orange striped oakworm); Antheraea pernyi Guérin-Méneville (Chinese Oak Tussah Moth); Bombyx mori Linnaeus (Silkworm); Bucculatrix thurberiella Busck (cotton leaf perforator); Colias eurytheme Boisduval (alfalfa caterpillar); Datana integerrima Grote & Robinson (walnut caterpillar); Dendrolimus sibiricus Tschetwerikov (Siberian silk moth), Ennomos subsignaria Hübner (elm spanworm); Erannis tiliaria Harris (linden looper); Euproctis chrysorrhoea Linnaeus (browntail moth); Harrisina americana Guérin-Méneville (grapeleaf skeletonizer); Hemileuca oliviae Cockrell (range caterpillar); Hyphantria cunea Drury (fall webworm); Keiferia lycopersicella Walsingham (tomato pinworm); Lambdina fiscellaria fiscellaria Hulst (Eastern hemlock looper); L. fiscellaria lugubrosa Hulst (Western hemlock looper); Leucoma salicis Linnaeus (satin moth); Lymantria dispar Linnaeus (gypsy moth); Manduca quinquemaculata Haworth (five spotted hawk moth, tomato hornworm); M. sexta Haworth (tomato hornworm, tobacco hornworm); Operophtera brumata Linnaeus (winter moth); Paleacrita vemata Peck (spring cankerworm); Papilio cresphontes Cramer (giant swallowtail orange dog); Phryganidia califomica Packard (California oakworm); Phyllocnistis citrella Stainton (citrus leafminer); Phyllonorycter blancardella Fabricius (spotted tentiform leafminer); Pieris brassicae Linnaeus (large white butterfly); P. rapae Linnaeus (small white butterfly); P. napi Linnaeus (green veined white butterfly); Platyptilia carduidactyla Riley (artichoke plume moth); Plutella xylostella Linnaeus (diamondback moth); Pectinophora gossypiella Saunders (pink bollworm); Pontia protodice Boisduval and Leconte (Southern cabbageworm); Sabulodes aegrotata Guenée (omnivorous looper); Schizura concinna J. E. Smith (red humped caterpillar); Sitotroga cerealella Olivier (Angoumois grain moth); Thaumetopoea pityocampa Schiffermuller (pine processionary caterpillar); Tineola bisselliella Hummel (webbing clothesmoth); Tuta absoluta Meyrick (tomato leafminer); Yponomeuta padella Linnaeus (ermine moth); Heliothis subflexa Guenée; Malacosoma spp. and Orgyia spp.

[0413] Of interest are larvae and adults of the order Coleoptera including weevils from the families Anthribidae, Bruchidae and Curculionidae (including, but not limited to: Anthonomus grandis Boheman (boll weevil); Lissorhoptrus oryzophilus Kuschel (rice water weevil); Sitophilus granarius Linnaeus (granary weevil); S. oryzae Linnaeus (rice weevil); Hypera punctata Fabricius (clover leaf weevil); Cylindrocopturus adspersus LeConte (sunflower stem weevil); Smicronyx fulvus LeConte (red sunflower seed weevil); S. sordidus LeConte (gray sunflower seed weevil); Sphenophorus maidis Chittenden (maize billbug)); flea beetles, cucumber beetles, rootworms, leaf beetles, potato beetles and leafminers in the family Chrysomelidae (including, but not limited to: Leptinotarsa decemlineata Say (Colorado potato beetle); Diabrotica virgifera virgifera LeConte (western corn rootworm); D. barberi Smith and Lawrence (northern corn rootworm); D. undecimpunctata howardi Barber (southern corn rootworm); Chaetocnema pulicaria Melsheimer (corn flea beetle); Phyllotreta cruciferae Goeze (Crucifer flea beetle); Phyllotreta striolata (stripped flea beetle); Colaspis brunnea Fabricius (grape colaspis); Oulema melanopus Linnaeus (cereal leaf beetle); Zygogramma exciamationis Fabricius (sunflower beetle)); beetles from the family Coccinellidae (including, but not limited to: Epilachna varivestis Mulsant (Mexican bean beetle)); chafers and other beetles from the family Scarabaeidae (including, but not limited to: Popillia japonica Newman (Japanese beetle); Cyclocephala borealis Arrow (northern masked chafer, white grub); C. immaculata Olivier (southern masked chafer, white grub); Rhizotrogus majalis Razoumowsky (European chafer); Phyllophaga crinita Burmeister (white grub); Ligyrus gibbosus De Geer (carrot beetle)); carpet beetles from the family Dermestidae; wireworms from the family Elateridae, Eleodes spp., Melanotus spp.; Conoderus spp.; Limonius spp.; Agriotes spp.; Ctenicera spp.; Aeolus spp.; bark beetles from the family Scolytidae and beetles from the family Tenebrionidae.

[0414] Adults and immatures of the order Diptera are of interest, including leafminers Agromyza parvicomis Loew (corn blotch leafminer); midges (including, but not limited to: Contarinia sorghicola Coquillett (sorghum midge); Mayetiola destructor Say (Hessian fly); Sitodiplosis mosellana Géhin (wheat midge); Neolasioptera murtfeldtiana Felt, (sunflower seed midge)); fruit flies (Tephritidae), Oscinella frit Linnaeus (fruit flies); maggots (including, but not limited to: Delia platura Meigen (seedcorn maggot); D. coarctata Fallen (wheat bulb fly) and other Delia spp., Meromyza americana Fitch (wheat stem maggot); Musca domestica Linnaeus (house flies); Fannia canicularis Linnaeus, F. femoralis Stein (lesser house flies); Stomoxys calcitrans Linnaeus (stable flies)); face flies, horn flies, blow flies, Chrysomya spp.; Phormia spp. and other muscoid fly pests, horse flies Tabanus spp.; bot flies Gastrophilus spp.; Oestrus spp.; cattle grubs Hypoderma spp.; deer flies Chrysops spp.; Melophagus ovinus Linnaeus (keds) and other Brachycera, mosquitoes Aedes spp.; Anopheles spp.; Culex spp.; black flies Prosimulium spp.; Simulium spp.; biting midges, sand flies, sciarids, and other Nematocera.

[0415] Included as insects of interest are adults and nymphs of the orders Hemiptera and Homoptera such as, but not limited to, adelgids from the family Adelgidae, plant bugs from the family Miridae, cicadas from the family Cicadidae, leafhoppers, Empoasca spp.; from the family Cicadellidae, planthoppers from the families Cixiidae, Flatidae, Fulgoroidea, Issidae and Delphacidae, treehoppers from the family Membracidae, psyllids from the family Psyllidae, whiteflies from the family Aleyrodidae, aphids from the family Aphididae, phylloxera from the family Phylloxeridae, mealybugs from the family Pseudococcidae, scales from the families Asterolecanidae, Coccidae, Dactylopiidae, Diaspididae, Eriococcidae Ortheziidae, Phoenicococcidae and Margarodidae, lace bugs from the family Tingidae, stink bugs from the family Pentatomidae, cinch bugs, Blissus spp.; and other seed bugs from the family Lygaeidae, spittlebugs from the family Cercopidae squash bugs from the family Coreidae and red bugs and cotton stainers from the family Pyrrhocoridae.

[0416] Agronomically important members from the order Homoptera further include, but are not limited to: Acyrthisiphon pisum Harris (pea aphid); Aphis craccivora Koch (cowpea aphid); A. fabae Scopoli (black bean aphid); A. gossypii Glover (cotton aphid, melon aphid); A. maidiradicis Forbes (corn root aphid); A. pomi De Geer (apple aphid); A. spiraecola Patch (spirea aphid); Aulacorthum solani Kaltenbach (foxglove aphid); Chaetosiphon fragaefolii Cockerell (strawberry aphid); Diuraphis noxia Kurdjumov/Mordvilko (Russian wheat aphid); Dysaphis plantaginea Paaserini (rosy apple aphid); Eriosoma lanigerum Hausmann (woolly apple aphid); Brevicoryne brassicae Linnaeus (cabbage aphid); Hyalopterus pruni Geoffroy (mealy plum aphid); Lipaphis erysimi Kaltenbach (turnip aphid); Metopolophium dirrhodum Walker (cereal aphid); Macrosiphum euphorbiae Thomas (potato aphid); Myzus persicae Sulzer (peach-potato aphid, green peach aphid); Nasonovia ribisnigri Mosley (lettuce aphid); Pemphigus spp. (root aphids and gall aphids); Rhopalosiphum maidis Fitch (corn leaf aphid); R. padi Linnaeus (bird cherry-oat aphid); Schizaphis graminum Rondani (greenbug); Sipha flava Forbes (yellow sugarcane aphid); Sitobion avenae Fabricius (English grain aphid); Therioaphis maculata Buckton (spotted alfalfa aphid); Toxoptera aurantii Boyer de Fonscolombe (black citrus aphid) and T. citricida Kirkaldy (brown citrus aphid); Adelges spp. (adelgids); Phylloxera devastatrix Pergande (pecan phylloxera); Bemisia tabaci Gennadius (tobacco whitefly, sweetpotato whitefly); B. argentifolii Bellows & Perring (silverleaf whitefly); Dialeurodes citri Ashmead (citrus whitefly); Trialeurodes abutiloneus (bandedwinged whitefly) and T. vaporariorum Westwood (greenhouse whitefly); Empoasca fabae Harris (potato leafhopper); Laodelphax striatellus Fallen (smaller brown planthopper); Macrolestes quadrilineatus Forbes (aster leafhopper); Nephotettix cinticeps Uhler (green leafhopper); N. nigropictus Stål (rice leafhopper); Nilaparvata lugens Stål (brown planthopper); Peregrinus maidis Ashmead (corn planthopper); Sogatella furcifera Horvath (white-backed planthopper); Sogatodes orizicola Muir (rice delphacid); Typhlocyba pomaria McAtee (white apple leafhopper); Erythroneoura spp. (grape leafhoppers); Magicicada septendecim Linnaeus (periodical cicada); Icerya purchasi Maskell (cottony cushion scale); Quadraspidiotus perniciosus Comstock (San Jose scale); Planococcus citri Risso (citrus mealybug); Pseudococcus spp. (other mealybug complex); Cacopsylla pyricola Foerster (pear psylla); Trioza diospyri Ashmead (persimmon psylla).

[0417] Agronomically important species of interest from the order Hemiptera include, but are not limited to: Acrosternum hilare Say (green stink bug); Anasa tristis De Geer (squash bug); Blissus leucopterus leucopterus Say (chinch bug); Corythuca gossypii Fabricius (cotton lace bug); Cyrtopeltis modesta Distant (tomato bug); Dysdercus suturellus Herrich-Schäffer (cotton stainer); Euschistus servus Say (brown stink bug); E. variolarius Palisot de Beauvois (one-spotted stink bug); Graptostethus spp. (complex of seed bugs); Leptoglossus corculus Say (leaf-footed pine seed bug); Lygus lineolaris Palisot de Beauvois (tarnished plant bug); L. Hesperus Knight (Western tarnished plant bug); L. pratensis Linnaeus (common meadow bug); L. rugulipennis Poppius (European tarnished plant bug); Lygocoris pabulinus Linnaeus (common green capsid); Nezara viridula Linnaeus (southern green stink bug); Oebalus pugnax Fabricius (rice stink bug); Oncopeltus fasciatus Dallas (large milkweed bug); Pseudatomoscelis seriatus Reuter (cotton fleahopper).

[0418] Furthermore, embodiments may be effective against Hemiptera such, Calocoris norvegicus Gmelin (strawberry bug); Orthops campestris Linnaeus; Plesiocoris rugicollis Fallen (apple capsid); Cyrtopeltis modestus Distant (tomato bug); Cyrtopeltis notatus Distant (suckfly); Spanagonicus albofasciatus Reuter (whitemarked fleahopper); Diaphnocoris chlorionis Say (honeylocust plant bug); Labopidicola allii Knight (onion plant bug); Pseudatomoscelis seriatus Reuter (cotton fleahopper); Adelphocoris rapidus Say (rapid plant bug); Poecilocapsus lineatus Fabricius (four-lined plant bug); Nysius ericae Schilling (false chinch bug); Nysius raphanus Howard (false chinch bug); Nezara viridula Linnaeus (Southern green stink bug); Eurygaster spp.; Coreidae spp.; Pyrrhocoridae spp.; Tinidae spp.; Blostomatidae spp.; Reduviidae spp. and Cimicidae spp.

[0419] Also included are adults and larvae of the order Acari (mites) such as Aceria tosichella Keifer (wheat curl mite); Petrobia latens Müller (brown wheat mite); spider mites and red mites in the family Tetranychidae, Panonychus ulmi Koch (European red mite); Tetranychus urticae Koch (two spotted spider mite); (T. mcdanieli McGregor (McDaniel mite); T. cinnabarinus Boisduval (carmine spider mite); T. turkestani Ugarov & Nikolski (strawberry spider mite); flat mites in the family Tenuipalpidae, Brevipalpus lewisi McGregor (citrus flat mite); rust and bud mites in the family Eriophyidae and other foliar feeding mites and mites important in human and animal health, i.e., dust mites in the family Epidermoptidae, follicle mites in the family Demodicidae, grain mites in the family Glycyphagidae, ticks in the order Ixodidae: Ixodes scapularis Say (deer tick); I. holocyclus Neumann (Australian paralysis tick); Dermacentor variabilis Say (American dog tick); Amblyomma americanum Linnaeus (lone star tick) and scab and itch mites in the families Psoroptidae, Pyemotidae and Sarcoptidae.

[0420] Insect pests of the order Thysanura are of interest, such as Lepisma saccharina Linnaeus (silverfish); Thermobia domestica Packard (firebrat).

[0421] Additional arthropod pests covered include: spiders in the order Araneae such as Loxosceles reclusa Gertsch and Mulaik (brown recluse spider) and the Latrodectus mactans Fabricius (black widow spider) and centipedes in the order Scutigeromorpha such as Scutigera coleoptrata Linnaeus (house centipede).

[0422] Insect pest of interest include the superfamily of stink bugs and other related insects including but not limited to species belonging to the family Pentatomidae (Nezara viridula, Halyomorpha halys, Piezodorus guildini, Euschistus servus, Acrosternum hilare, Euschistus heros, Euschistus tristigmus, Acrosternum hilare, Dichelops furcatus, Dichelops melacanthus, and Bagrada hilaris (Bagrada Bug)), the family Plataspidae (Megacopta cribraria—Bean plataspid) and the family Cydnidae (Scaptocoris castanea—Root stink bug) and Lepidoptera species including but not limited to: diamond-back moth, e.g., Helicoverpa zea Boddie; soybean looper, e.g., Pseudoplusia includens Walker and velvet bean caterpillar e.g., Anticarsia gemmatalis Hübner.

[0423] Methods for measuring pesticidal activity are well known in the art. See, for example, Czapla and Lang, (1990) J. Econ. Entomol. 83:2480-2485; Andrews, et al., (1988) Biochem. J. 252:199-206; Marrone, et al., (1985) J. of Economic Entomology 78:290-293 and U.S. Pat. No. 5,743,477, all of which are herein incorporated by reference in their entirety. Generally, the protein is mixed and used in feeding assays. See, for example Marrone, et al., (1985) J. of Economic Entomology 78:290-293. Such assays can include contacting plants with one or more pests and determining the plant's ability to survive and/or cause the death of the pests.

[0424] Nematodes include parasitic nematodes such as root-knot, cyst and lesion nematodes, including Heterodera spp., Meloidogyne spp. and Globodera spp.; particularly members of the cyst nematodes, including, but not limited to, Heterodera glycines (soybean cyst nematode); Heterodera schachtii (beet cyst nematode); Heterodera avenae (cereal cyst nematode) and Globodera rostochiensis and Globodera pailida (potato cyst nematodes). Lesion nematodes include Pratylenchus spp.

### Seed Treatment

[0425] To protect and to enhance yield production and trait technologies, seed treatment options can provide additional crop plan flexibility and cost effective control against insects, weeds and diseases. Seed material can be treated, typically surface treated, with a composition comprising combinations of chemical or biological herbicides, herbicide safeners, insecticides, fungicides, germination inhibitors and enhancers, nutrients, plant growth regulators and activators, bactericides, nematocides, avicides and/or molluscicides. These compounds are typically formulated together with further carriers, surfactants or application-promoting adjuvants customarily employed in the art of formulation. The coatings may be applied by impregnating propagation material with a liquid formulation or by coating with a combined wet or dry formulation. Examples of the various types of compounds that may be used as seed treatments are provided in The Pesticide Manual: A World Compendium, C. D. S. Tomlin Ed., Published by the British Crop Production Council, which is hereby incorporated by reference.

[0426] Some seed treatments that may be used on crop seed include, but are not limited to, one or more of abscisic acid, acibenzolar-S-methyl, avermectin, amitrol, azaconazole, azospirillum, azadirachtin, azoxystrobin, Bacillus spp. (including one or more of cereus, firmus, megaterium, pumilis, sphaericus, subtilis and/or thuringiensis species), bradyrhizobium spp. (including one or more of betae, canariense, elkanii, iriomotense, japonicum, liaonigense, pachyrhizi and/or yuanmingense), captan, carboxin, chitosan, clothianidin, copper, cyazypyr, difenoconazole, etidiazole, fipronil, fludioxonil, fluoxastrobin, fluquinconazole, flurazole, fluxofenim, harpin protein, imazalil, imidacloprid, ipconazole, isoflavenoids, lipo-chitooligosaccharide, mancozeb, manganese, maneb, mefenoxam, metalaxyl, metconazole, myclobutanil, PCNB, penflufen, penicillium, penthiopyrad, permethrine, picoxystrobin, prothioconazole, pyraclostrobin, rynaxypyr, S-metolachlor, saponin, sedaxane, TCMTB, tebuconazole, thiabendazole, thiamethoxam, thiocarb, thiram, tolclofos-methyl, triadimenol, trichoderma, trifloxystrobin, triticonazole and/or zinc. PCNB seed coat refers to EPA Registration Number 00293500419, containing quintozen and terrazole. TCMTB refers to 2-(thiocyanomethylthio) benzothiazole.

[0427] Seed varieties and seeds with specific transgenic traits may be tested to determine which seed treatment options and application rates may complement such varieties and transgenic traits in order to enhance yield. For example, a variety with good yield potential but head smut susceptibility may benefit from the use of a seed treatment that provides protection against head smut, a variety with good yield potential but cyst nematode susceptibility may benefit from the use of a seed treatment that provides protection against cyst nematode, and so on. Likewise, a variety encompassing a transgenic trait conferring insect resistance may benefit from the second mode of action conferred by the seed treatment, a variety encompassing a transgenic trait conferring herbicide resistance may benefit from a seed treatment with a safener that enhances the plants resistance to that herbicide, etc. Further, the good root establishment and early emergence that results from the proper use of a seed treatment may result in more efficient nitrogen use, a better ability to withstand drought and an overall increase in yield potential of a variety or varieties containing a certain trait when combined with a seed treatment.

### Methods for Killing an Insect Pest and Controlling an Insect Population

[0428] In some embodiments methods are provided for killing an insect pest, comprising contacting the insect pest with an insecticidally-effective amount of a recombinant PtIP-83 polypeptide. In some embodiments methods are provided for killing an insect pest, comprising contacting the insect pest with an insecticidally-effective amount of a recombinant pesticidal protein of SEQ ID NO: 1, SEQ ID NO: 3, SEQ ID NO: 5, SEQ ID NO: 7, SEQ ID NO: 9, SEQ ID NO: 11, SEQ ID NO: 13, SEQ ID NO: 15, SEQ ID NO: 17, SEQ ID NO: 19, SEQ ID NO: 21, SEQ ID NO: 23, SEQ ID NO: 716, SEQ ID NO: 754, SEQ ID NO: 755, SEQ ID NO: 756, SEQ ID NO: 757, SEQ ID NO: 758, SEQ ID NO: 759, SEQ ID NO: 760, SEQ ID NO: 761, SEQ ID NO: 762, SEQ ID NO: 763, SEQ ID NO: 764, SEQ ID NO: 765, SEQ ID NO: 766, SEQ ID NO: 767, SEQ ID NO: 768, SEQ ID NO: 769 or a variant thereof.

[0429] In some embodiments methods are provided for killing an insect pest, comprising contacting the insect pest with an insecticidally-effective amount of a recombinant PtIP-83 polypeptide of SEQ ID NO: 236-299, SEQ ID NO: 334-367, SEQ ID NO: 398-427, SEQ ID NO: 518-607, SEQ ID NO: 640-645, and SEQ ID NO: 728-737.

[0430] In some embodiments methods are provided for killing an insect pest, comprising contacting the insect pest with an insecticidally-effective amount of a recombinant PtIP-83 polypeptide comprising an amino acid sequence of any one of SEQ ID NO: 786-888 or a variant thereof.

[0431] In some embodiments methods are provided for controlling an insect pest population, comprising contacting the insect pest population with an insecticidally-effective amount of a recombinant PtIP-83 polypeptide. In some embodiments methods are provided for controlling an insect pest population, comprising contacting the insect pest population with an insecticidally-effective amount of a recombinant PtIP-83 polypeptide of SEQ ID NO: 1, SEQ ID NO: 3, SEQ ID NO: 5, SEQ ID NO: 7, SEQ ID NO: 9, SEQ ID NO: 11, SEQ ID NO: 13, SEQ ID NO: 15, SEQ ID NO: 17, SEQ ID NO: 19, SEQ ID NO: 21, SEQ ID NO: 23, SEQ ID NO: 716, SEQ ID NO: 754, SEQ ID NO: 755, SEQ ID NO: 756, SEQ ID NO: 757, SEQ ID NO: 758, SEQ ID NO: 759, SEQ ID NO: 760, SEQ ID NO: 761, SEQ ID NO: 762, SEQ ID NO: 763, SEQ ID NO: 764, SEQ ID NO: 765, SEQ ID NO: 766, SEQ ID NO: 767, SEQ ID NO: 768, SEQ ID NO: 769 or a variant thereof. As used herein, “controlling a pest population” or “controls a pest” refers to any effect on a pest that results in limiting the damage that the pest causes. Controlling a pest includes, but is not limited to, killing the pest, inhibiting development of the pest, altering fertility or growth of the pest in such a manner that the pest provides less damage to the plant, decreasing the number of offspring produced, producing less fit pests, producing pests more susceptible to predator attack or deterring the pests from eating the plant.

[0432] In some embodiments methods are provided for controlling an insect pest population, comprising contacting the insect pest population with an insecticidally-effective amount of a recombinant PtIP-83 polypeptide of any one of SEQ ID NO: 236-299, SEQ ID NO: 334-367, SEQ ID NO: 398-427, SEQ ID NO: 518-607, SEQ ID NO: 640-645, and SEQ ID NO: 728-737.

[0433] In some embodiments methods are provided for controlling an insect pest population, comprising contacting the insect pest population with an insecticidally-effective amount of a recombinant PtIP-83 polypeptide of any one of SEQ ID NO: 786-888 or a variant thereof.

[0434] In some embodiments methods are provided for protecting a plant from an insect pest, comprising expressing in the plant or cell thereof at least one recombinant polynucleotide encoding a PtIP-83 polypeptide. In some embodiments methods are provided for protecting a plant from an insect pest, comprising expressing in the plant or cell thereof a recombinant polynucleotide encoding a PtIP-83 polypeptide of SEQ ID NO: 1, SEQ ID NO: 3, SEQ ID NO: 5, SEQ ID NO: 7, SEQ ID NO: 9, SEQ ID NO: 11, SEQ ID NO: 13, SEQ ID NO: 15, SEQ ID NO: 17, SEQ ID NO: 19, SEQ ID NO: 21, SEQ ID NO: 23, SEQ ID NO: 716, SEQ ID NO: 754, SEQ ID NO: 755, SEQ ID NO: 756, SEQ ID NO: 757, SEQ ID NO: 758, SEQ ID NO: 759, SEQ ID NO: 760, SEQ ID NO: 761, SEQ ID NO: 762, SEQ ID NO: 763, SEQ ID NO: 764, SEQ ID NO: 765, SEQ ID NO: 766, SEQ ID NO: 767, SEQ ID NO: 768 or SEQ ID NO: 769 or variants thereof.

[0435] In some embodiments methods are provided for protecting a plant from an insect pest, comprising expressing in the plant or cell thereof at least one recombinant polynucleotide encoding a PtIP-83 polypeptide. In some embodiments methods are provided for protecting a plant from an insect pest, comprising expressing in the plant or cell thereof a recombinant polynucleotide encoding a PtIP-83 polypeptide of any one of SEQ ID NO: 236-299, SEQ ID NO: 334-367, SEQ ID NO: 398-427, SEQ ID NO: 518-607, SEQ ID NO: 640-645, and SEQ ID NO: 728-737.

[0436] In some embodiments methods are provided for protecting a plant from an insect pest, comprising expressing in the plant or cell thereof at least one recombinant polynucleotide encoding a PtIP-83 polypeptide. In some embodiments methods are provided for protecting a plant from an insect pest, comprising expressing in the plant or cell thereof a recombinant polynucleotide encoding a PtIP-83 polypeptide of any one of SEQ ID NO: 786-888 or a variant thereof.

### Insect Resistance Management (IRM) Strategies

[0437] Expression of B. thuringiensis δ-endotoxins in transgenic corn plants has proven to be an effective means of controlling agriculturally important insect pests (Perlak, et al., 1990; 1993). However, insects have evolved that are resistant to B. thuringiensis δ-endotoxins expressed in transgenic plants. Such resistance, should it become widespread, would clearly limit the commercial value of germplasm containing genes encoding such B. thuringiensis δ-endotoxins.

[0438] One way to increasing the duration of effectiveness of the transgenic insecticides against target pests and contemporaneously reducing the development of insecticide-resistant pests is to provide non-transgenic (i.e., non-insecticidal protein expressing) refuge crop plants(a section of non-insecticidal crops/corn) for use with transgenic crops producing a single insecticidal protein active against target pests. The United States Environmental Protection Agency (epa.gov/oppbppdl/biopesticides/pips/bt_corn_refuge_2006.htm, which can be accessed using the www prefix) publishes the requirements for use with transgenic crops producing a single Bt protein active against target pests. In addition, the National Corn Growers Association, on their website: (ncga.com/insect-resistance-management-fact-sheet-bt-corn, which can be accessed using the www prefix) also provides similar guidance regarding refuge requirements. Economic factors constrain this approach as losses to insects within the refuge area, larger refuges may reduce overall yield.

[0439] Another way of increasing the duration of effectiveness of the transgenic insecticides against target pests and contemporaneously reducing the development of insecticide-resistant pests would be to have a repository of insecticidal genes that are effective against groups of insect pests and which manifest their effects through different modes of action where each gene could be deployed against a fixed number of generations of insects before another gene is deployed.

[0440] Expression in a plant of two or more insecticidal compositions toxic to the same insect species, each insecticide being expressed at efficacious levels would be another way to achieve control of the development of resistance. This is based on the principle that evolution of resistance against two separate modes of action is far more unlikely than only one. Roush, for example, outlines two-toxin strategies, also called “pyramiding” or “stacking,” for management of insecticidal transgenic crops. (The Royal Society. Phil. Trans. R. Soc. Lond. B. (1998) 353:1777-1786). Stacking or pyramiding of two different proteins each effective against the target pests and with little or no cross-resistance can allow for use of a smaller refuge. The US Environmental Protection Agency requires significantly less (generally 5%) structured refuge of non-Bt corn be planted than for single trait products (generally 20%). There are various ways of providing the IRM effects of a refuge, including various geometric planting patterns in the fields and in-bag seed mixtures, as discussed further by Roush.

[0441] Bacillus thuringiensis Cry family toxins generally show a two-phase mechanism action starting with proteolytic activation in the insect midgut and then specific binding to midgut intestinal cells followed by cytolytic pore formation (Griffitts and Aroian, BioEssays, 2005). This second step includes both the site of action (the site at which the toxin binds, and the mode of action, the pore formation. Generally, Bt Cry toxins may show different sites of action, but all show the same mode of action via pore formation. One mechanism employed to delay resistance of insects from one toxin to another includes stacking two different Bt Cry toxins with the same mode of action, but different sites of action, as determined by heterologous competitive binding assays (See Ferre and Van Rie, Annu. Rev. Entomol. 2002).

[0442] In some embodiments the PtIP-83 polypeptide of the disclosure are useful as an insect resistance management strategy in combination (i.e., pyramided) with other pesticidal proteins include but are not limited to Bt toxins, Xenorhabdus sp. or Photorhabdus sp. insecticidal proteins, and the like.

[0443] Provided are methods of controlling Lepidoptera and/or Coleoptera insect infestation(s) in a transgenic plant that promote insect resistance management, comprising expressing in the plant at least two different insecticidal proteins having different modes of action.

[0444] In some embodiments the methods of controlling Lepidoptera and/or Coleoptera insect infestation in a transgenic plant and promoting insect resistance management the at least one of the insecticidal proteins comprise a PtIP-83 polypeptide insecticidal to insects in the order Lepidoptera and/or Coleoptera.

[0445] In some embodiments the methods of controlling Lepidoptera and/or Coleoptera insect infestation in a transgenic plant and promoting insect resistance management the at least one of the insecticidal proteins comprises a PtIP-83 polypeptide of SEQ ID NO: 1, SEQ ID NO: 3, SEQ ID NO: 5, SEQ ID NO: 7, SEQ ID NO: 9, SEQ ID NO: 11, SEQ ID NO: 13, SEQ ID NO: 15, SEQ ID NO: 17, SEQ ID NO: 19, SEQ ID NO: 21, SEQ ID NO: 23, SEQ ID NO: 716, SEQ ID NO: 754, SEQ ID NO: 755, SEQ ID NO: 756, SEQ ID NO: 757, SEQ ID NO: 758, SEQ ID NO: 759, SEQ ID NO: 760, SEQ ID NO: 761, SEQ ID NO: 762, SEQ ID NO: 763, SEQ ID NO: 764, SEQ ID NO: 765, SEQ ID NO: 766, SEQ ID NO: 767, SEQ ID NO: 768, SEQ ID NO: 769 or variants thereof, insecticidal to insects in the order Lepidoptera and/or Coleoptera.

[0446] In some embodiments the methods of controlling Lepidoptera and/or Coleoptera insect infestation in a transgenic plant and promoting insect resistance management the at least one of the insecticidal proteins comprises a PtIP-83 polypeptide of any one of SEQ ID NO: 236-299, SEQ ID NO: 334-367, SEQ ID NO: 398-427, SEQ ID NO: 518-607, SEQ ID NO: 640-645, and SEQ ID NO: 728-737.

[0447] In some embodiments the methods of controlling Lepidoptera and/or Coleoptera insect infestation in a transgenic plant and promoting insect resistance management comprise expressing in the transgenic plant a PtIP-83 polypeptide and a Cry protein insecticidal to insects in the order Lepidoptera and/or Coleoptera having different modes of action.

[0448] In some embodiments the methods of controlling Lepidoptera and/or Coleoptera insect infestation of a transgenic plant and promoting insect resistance management comprise in the transgenic plant a PtIP-83 polypeptide of SEQ ID NO: 1, SEQ ID NO: 3, SEQ ID NO: 5, SEQ ID NO: 7, SEQ ID NO: 9, SEQ ID NO: 11, SEQ ID NO: 13, SEQ ID NO: 15, SEQ ID NO: 17, SEQ ID NO: 19, SEQ ID NO: 21, SEQ ID NO: 23, SEQ ID NO: 716, SEQ ID NO: 754, SEQ ID NO: 755, SEQ ID NO: 756, SEQ ID NO: 757, SEQ ID NO: 758, SEQ ID NO: 759, SEQ ID NO: 760, SEQ ID NO: 761, SEQ ID NO: 762, SEQ ID NO: 763, SEQ ID NO: 764, SEQ ID NO: 765, SEQ ID NO: 766, SEQ ID NO: 767, SEQ ID NO: 768, SEQ ID NO: 769 or variants thereof and a Cry protein insecticidal to insects in the order Lepidoptera and/or Coleoptera having different modes of action.

[0449] Also provided are methods of reducing likelihood of emergence of Lepidoptera and/or Coleoptera insect resistance to transgenic plants expressing in the plants insecticidal proteins to control the insect species, comprising expression of a PtIP-83 polypeptide insecticidal to the insect species in combination with a second insecticidal protein to the insect species having different modes of action.

[0450] Also provided are means for effective Lepidoptera and/or Coleoptera insect resistance management of transgenic plants, comprising co-expressing at high levels in the plants two or more insecticidal proteins toxic to Lepidoptera and/or Coleoptera insects but each exhibiting a different mode of effectuating its killing activity, wherein the two or more insecticidal proteins comprise a PtIP-83 polypeptide and a Cry protein. Also provided are means for effective Lepidoptera and/or Coleoptera insect resistance management of transgenic plants, comprising co-expressing at high levels in the plants two or more insecticidal proteins toxic to Lepidoptera and/or Coleoptera insects but each exhibiting a different mode of effectuating its killing activity, wherein the two or more insecticidal proteins comprise a PtIP-83 polypeptide of SEQ ID NO: 1, SEQ ID NO: 3, SEQ ID NO: 5, SEQ ID NO: 7, SEQ ID NO: 9, SEQ ID NO: 11, SEQ ID NO: 13, SEQ ID NO: 15, SEQ ID NO: 17, SEQ ID NO: 19, SEQ ID NO: 21, SEQ ID NO: 23, SEQ ID NO: 716, SEQ ID NO: 754, SEQ ID NO: 755, SEQ ID NO: 756, SEQ ID NO: 757, SEQ ID NO: 758, SEQ ID NO: 759, SEQ ID NO: 760, SEQ ID NO: 761, SEQ ID NO: 762, SEQ ID NO: 763, SEQ ID NO: 764, SEQ ID NO: 765, SEQ ID NO: 766, SEQ ID NO: 767, SEQ ID NO: 768, SEQ ID NO: 769 or variants thereof and a Cry protein.

[0451] In addition, methods are provided for obtaining regulatory approval for planting or commercialization of plants expressing proteins insecticidal to insects in the order Lepidoptera and/or Coleoptera, comprising the step of referring to, submitting or relying on insect assay binding data showing that the PtIP-83 polypeptide does not compete with binding sites for Cry proteins in such insects. In addition, methods are provided for obtaining regulatory approval for planting or commercialization of plants expressing proteins insecticidal to insects in the order Lepidoptera and/or Coleoptera, comprising the step of referring to, submitting or relying on insect assay binding data showing that the PtIP-83 polypeptide of SEQ ID NO: 1, SEQ ID NO: 3, SEQ ID NO: 5, SEQ ID NO: 7, SEQ ID NO: 9, SEQ ID NO: 11, SEQ ID NO: 13, SEQ ID NO: 15, SEQ ID NO: 17, SEQ ID NO: 19, SEQ ID NO: 21, SEQ ID NO: 23, SEQ ID NO: 716, SEQ ID NO: 754, SEQ ID NO: 755, SEQ ID NO: 756, SEQ ID NO: 757, SEQ ID NO: 758, SEQ ID NO: 759, SEQ ID NO: 760, SEQ ID NO: 761, SEQ ID NO: 762, SEQ ID NO: 763, SEQ ID NO: 764, SEQ ID NO: 765, SEQ ID NO: 766, SEQ ID NO: 767, SEQ ID NO: 768, SEQ ID NO: 769 or variant thereof does not compete with binding sites for Cry proteins in such insects.

### Methods for Increasing Plant Yield

[0452] Methods for increasing plant yield are provided. The methods comprise providing a plant or plant cell expressing a polynucleotide encoding the pesticidal polypeptide sequence disclosed herein and growing the plant or a seed thereof in a field infested with a pest against which the polypeptide has pesticidal activity. In some embodiments, the polypeptide has pesticidal activity against a Lepidopteran, Coleopteran, Dipteran, Hemipteran or nematode pest, and the field is infested with a Lepidopteran, Hemipteran, Coleopteran, Dipteran or nematode pest.

[0453] As defined herein, the “yield” of the plant refers to the quality and/or quantity of biomass produced by the plant. “Biomass” as used herein refers to any measured plant product. An increase in biomass production is any improvement in the yield of the measured plant product. Increasing plant yield has several commercial applications. For example, increasing plant leaf biomass may increase the yield of leafy vegetables for human or animal consumption. Additionally, increasing leaf biomass can be used to increase production of plant-derived pharmaceutical or industrial products. An increase in yield can comprise any statistically significant increase including, but not limited to, at least a 1% increase, at least a 3% increase, at least a 5% increase, at least a 10% increase, at least a 20% increase, at least a 30%, at least a 50%, at least a 70%, at least a 100% or a greater increase in yield compared to a plant not expressing the pesticidal sequence.

[0454] In specific methods, plant yield is increased as a result of improved pest resistance of a plant expressing a PtIP-83 polypeptide disclosed herein. Expression of the PtIP-83 polypeptide results in a reduced ability of a pest to infest or feed on the plant, thus improving plant yield.

### Methods of Processing

[0455] Further provided are methods of processing a plant, plant part or seed to obtain a food or feed product from a plant, plant part or seed comprising a PtIP-83 polypeptide. The plants, plant parts or seeds provided herein, can be processed to yield oil, protein products and/or by-products that are derivatives obtained by processing that have commercial value. Non-limiting examples include transgenic seeds comprising a nucleic acid molecule encoding a PtIP-83 polypeptide which can be processed to yield soy oil, soy products and/or soy by-products.

[0456] “Processing” refers to any physical and chemical methods used to obtain any soy product and includes, but is not limited to, heat conditioning, flaking and grinding, extrusion, solvent extraction or aqueous soaking and extraction of whole or partial seeds The following examples are offered by way of illustration and not by way of limitation.

### EXPERIMENTALS

### Example 1

### Identification of an Insecticidal Protein Active Against Broad Spectrum of Lepidopteran Insects from the Fern, Adiantum pedatum, (PS-7140)

[0457] The insecticidal protein PtIP-83Aa (SEQ ID NO: 1) was identified by protein purification, mass spectroscopy (MS) and PCR cloning from Adiantum pedatum, (PS-7140) as follows.

[0458] Adiantum pedatum was collected by a collaborator and assigned identification number PS-7140. PS-7140 was collected, flash frozen in liquid N₂ and stored at −80° C. After storage it was ground to a fine powder at liquid N₂ temperatures with a Geno Ball Mill (SPEX, Metuchen, N.J.). To extract protein, 20 mL of 50 mM Tris buffer, pH 8.0, 150 mM KCl, 2.5 mM EDTA, 1.5% polyvinylpolypyrrolidone (PVPP) and protease inhibitor cocktail (Roche Diagnostics, Germany) was added to every 5 g fresh weight of tissue. The homogenate was centrifuged to remove cell debris, filtered through 0.22 um filters and desalted using 10 ml Zeba Spin Desalting columns (Thermo Scientific, IL.)

[0459] Bioassays against the three pest species, Soybean Looper (SBL) (Chrysodeixis includens), Corn Earworm (CEVV) (Helicoverpa zea) and European Corn Borer (ECB) (Ostrinia nubilalis) were conducted using the desalted protein extract overlaid onto an agar-based Lepidoptera diet (Southland Products Inc., Lake Village, Ark.) in a 96-well plate format. Six replicates were used per sample. Samples were allowed to dry on top of the diet and two to five neonate insects were placed into each well of the treated plate. After four days of incubation at 27° C. larvae were scored for mortality or severity of stunting. The scores were recorded numerically as dead (3), severely stunted (2) (little or no growth but alive and equivalent to a 1^{st} instar larvae), stunted (1) (growth to second instar but not equivalent to controls), or normal (0). Subjecting the sample to proteinase K and heat treatments resulted in loss of activity indicating that the active principle was proteinaceous in nature. Bioassay results are shown in Table 6.

TABLE 6

| | Activity of A. pedatum crude protein extract against Lepidoptera larvae | | |
|---|---|---|---|
| | | | Ave. Score after |
| | | Ave. Score | Proteinase K/Heat |
| Neonate | Soybean Looper | 3 | 0 |
| | Corn Earworm | 2 | 0 |
| | European Corn Borer | 1.5 | 0 |

[0460] For protein purification, PS-7140 fronds were ground to a fine powder at liquid N₂ temperatures with a Geno Ball Mill (SPEX, Metuchen, N.J.). Protein was extracted in 100 mM Tris buffer, pH 8.0, 150 mM KCl, 2.5 mM EDTA, 1.5% PVPP and protease inhibitor cocktail (Roche Diagnostics, Germany). The extracted material was centrifuged to remove cell debris, filtered through Miracloth™ (Calbiochem) and then ammonium sulfate added to 35% and allowed to equilibrate. The suspension was centrifuged and the resulting pellet was resuspended in a small volume of 20 mM Tris buffer, pH 8. After clarification by centrifugation it was desalted using a Sephadex G25 column (GE, Piscataway, N.J.) equilibrated in 20 mM Tris buffer, pH 8. The desalted protein fraction pool was loaded onto a 1 ml Mono Q column (GE, Piscataway, N.J.) and eluted with a linear (60 CV (column volumes) gradient from 0 M to 0.7 M NaCl in 20 mM Tris, pH 8.0. Fractions active against SBL and ECB were combined and desalted into 25 mM MOPS, pH 6.7. This was then loaded onto a 4 mL Mono P column (Buffer A: 25 mM MOPS, pH 6.7; Buffer B: Polybuffer 74, pH 4) using a 4 CV linear gradient (0% Buffer B) followed by a 15 CV 100% Buffer B wash. 1 mL fractions were collected. Fractions 47 and 48 showed activity against ECB and SBL. Based on LDS-PAGE these active fractions contained a protein band at approximately 95 kDa. The protein representing the 95 kDa band was named PtIP-83Aa (SEQ ID NO: 1).

[0461] Protein identification was performed by MS analysis after protein digestion with trypsin. Proteins for MS identification were obtained after running the sample on an LDS-PAGE gel stained with Brilliant Blue G-250 Stain. Bands of interest were excised from the gel, de-stained, reduced with dithiothreitol and then alkylated with iodoacetamide. Following overnight digestion with trypsin, samples were analyzed by nano-liquid chromatography/electrospray tandem mass spectrometry (nano-LC/ES-MSMS) on a Thermo Q Exactive Orbitrap mass spectrometer (Thermo Fisher Scientific) interfaced with an Eksigent NanoLC Ultra 1-D Plus nano-lc system and a nanolc-as2 autosampler (AB Sciex). The protein identification was performed by searching the nano-LC/MSMS data against an in-house transcriptome database containing the transcripts from the source plant materials and the public protein database Swiss-Prot using the Mascot search engine (Matrix Science).

[0462] The amino acid sequence of SEQ ID NO: 1 was BLAST (Basic Local Alignment Search Tool; Altschul, et al., (1993) J. Mol. Biol. 215:403-410; see also ncbi.nlm.nih.gov/BLAST/, which can be accessed using the www prefix) searched against public and DUPONT-PIONEER internal databases that included plant protein sequences. Amino acid sequences were aligned with proteins in a proprietary DUPONT-PIONEER plant protein database.

### Example 2

### Transcriptomic Sequencing of PtIP-83Aa

[0463] A transcriptome for Adiantum pedatum, PS-7140 was prepared as follows. Total RNAs were isolated from frozen tissues by use of the Qiagen® RNeasy® kit for total RNA isolation. Sequencing libraries from the resulting total RNAs were prepared using the TruSeq™ mRNA-Seq kit and protocol from Illumina®, Inc. (San Diego, Calif.). Briefly, mRNAs were isolated via attachment to oligo(dT) beads, fragmented to a mean size of 180 nt, reverse transcribed into cDNA by random hexamer prime, end repaired, 3′ A-tailed, and ligated with Illumina® indexed TruSeq™ adapters. Ligated cDNA fragments were PCR amplified using Illumina® TruSeq™ primers and purified PCR products were checked for quality and quantity on the Agilent Bioanalyzer® DNA 7500 chip. Post quality and quantity assessment, 100 ng of the transcript library was normalized by treatment with Duplex Specific Nuclease (DSN) (Evrogen®, Moscow, Russia). Normalization was accomplished by addition of 200 mM Hepes buffer, followed by heat denaturation and five hour anneal at 68° C. Annealed library was treated with 2 ul of DSN enzyme for 25 minutes, purified by Qiagen® MinElute® columns according to manufacturer protocols, and amplified twelve cycles using Illumina® adapter specific primers. Final products were purified with Ampure® XP beads (Beckman Genomics, Danvers, Mass.) and checked for quality and quantity on the Agilent Bioanalyzer® DNA 7500 chip.

[0464] Normalized transcript libraries were sequenced according to manufacturer protocols on the Illumina® Genome Analyzer IIx. Each library was hybridized to two flow cell lanes and amplified, blocked, linearized and primer hybridized using the Illumina clonal cluster generation process on cBot®. Sequencing was completed on the Genome Analyzer IIx, generating sixty million 75 bp paired end reads per normalized library.

[0465] Peptide sequence identified for PtIP-83Aa (SEQ ID NO: 1) by LC-MS/MS/MS sequencing (described in Example 1) were searched against the protein sequences predicted by open reading frames (ORFs) from the internal transcriptome for PS-7140CF assemblies. The peptides gave a perfect match to a transcript corresponding to PtIP-83Aa (SEQ ID NO: 2). The coding sequences were used to design the following primers to clone the PtIP-83Aa coding sequence:

(95KD N-T Nco I for)
(SEQ ID NO: 30)
CCATGGCTCTCGTGGATTACGGCAAG
and
(95KD C-T Hpa I REV)
(SEQ ID NO: 31)
GTTAACCTACTCTTCGTCGTGCCGCCAGTC.

[0466] This clone was produced by polymerase chain reaction using the KOD Hot Start DNA polymerase® PCR kit (Novagen, Merck KGaA, Darmstadt, Germany) and the total RNA from Adiantum pedatum as a template. The cloned PCR product was confirmed by sequencing.

[0467] Based on the DNA and protein sequencing, the PtIP-83Aa polynucleotide sequence is shown as SEQ ID NO: 2 and the polypeptide sequence as SEQ ID NO: 1.

### Example 3

### Identification of PtIP-83 Homologs

[0468] Gene identities may be determined by conducting BLAST® (Basic Local Alignment Search Tool; Altschul, et al., (1993) J. Mol. Biol. 215:403-410; see also ncbi.nlm.nih.gov/BLAST/, which can be accessed using the www prefix) searches under default parameters for similarity to sequences. The polynucleotide sequence for PtIP-83Aa (SEQ ID NO: 2) was analyzed. No close homologs of PtIP-83Aa (SEQ ID NO: 1) were identified in public databases.

[0469] Gene identities conducted by BLAST® in a DUPONT PIONEER internal transcriptome database of ferns and other primitive plants identified homologs for PtIP-83Aa (SEQ ID NO: 1). The PtIP-83Aa homologs and the organism they were identified from are shown in Table 7.

TABLE 7

| | Sequence id no | Source | Organism |
|---|---|---|---|
| PtIP-83Aa | SEQ ID NO: 1 | PS-7140 | Adiantum pedatum |
| PtIP-83Ca | SEQ ID NO: 5 | PS-11481 | Adiantum trapeziforme var. |
| | | | braziliense |
| PtIP-83Cb | SEQ ID NO: 7 | PS-11481 | Adiantum trapeziforme var. |
| | | | braziliense |
| PtIP-83Cc | SEQ ID NO: 9 | PS-11481 | Adiantum trapeziforme var. |
| | | | braziliense |
| PtIP-83Cd | SEQ ID NO: 11 | PS-11481 | Adiantum trapeziforme var. |
| | | | braziliense |
| PtIP-83Ce | SEQ ID NO: 13 | PS-12345 | Adiantum peruvianum |
| PtIP-83Cf | SEQ ID NO: 15 | PS-9224 | Lygodium flexuosum |
| PtIP-83Cg | SEQ ID NO: 17 | PS-12345 | Adiantum peruvianum |
| PtIP-83Da | SEQ ID NO: 19 | PS-12345 | Adiantum peruvianum |
| PtIP-83Ea | SEQ ID NO: 21 | PS-11481 | Adiantum trapeziforme var. |
| | | | braziliense |
| PtIP-83Eb | SEQ ID NO: 23 | PS-11481 | Adiantum trapeziforme var. |
| | | | braziliense |
| PtIP-83Fa | SEQ ID NO: 3 | PS-8568 | Microsorum musifolium |
| PtIP-83Fb | SEQ ID NO: 716 | PS-9319 | Polypodium punctatum |
| | | | ‘Serratum’ |
| PtIP-83Ch | SEQ ID NO: 754 | LW13327 | Polystichium tsus-simense |
| PtIP-83Ch- | SEQ ID NO: 755 | LW13327 | Polystichium tsus-simense |
| like | | | |
| PtIP-83Fd | SEQ ID NO: 756 | LW13327 | Polystichium tsus-simense |
| PtIP-83Fe | SEQ ID NO: 757 | LW13327 | Polystichium tsus-simense |
| PtIP-83Ci | SEQ ID NO: 758 | LW12354 | Rumohra adiantiformis |
| PtIP-83Ci- | SEQ ID NO: 759 | LW12354 | Rumohra adiantiformis |
| like | | | |
| PtIP-83Ff | SEQ ID NO: 760 | LW12354 | Rumohra adiantiformis |
| PtIP-83Ff- | SEQ ID NO: 761 | LW12354 | Rumohra adiantiformis |
| like | | | |
| PtIP-83Cj | SEQ ID NO: 762 | NY012 | Asplenium trichomanes |
| PtIP-83Cj- | SEQ ID NO: 763 | NY012 | Asplenium trichomanes |
| like | | | |
| PtIP-83Ga | SEQ ID NO: 764 | NY009 | Phyllitis scolopendium |
| | | | ‘Angustifolia’ |
| PtIP-83Ga- | SEQ ID NO: 765 | NY009 | Phyllitis scolopendium |
| like | | | ‘Angustifolia’ |
| PtIP-83Fg | SEQ ID NO: 766 | NY009 | Phyllitis scolopendium |
| | | | ‘Angustifolia’ |
| PtIP-83Fh | SEQ ID NO: 767 | NY009 | Phyllitis scolopendium |
| | | | ‘Angustifolia’ |
| PtIP-83Fi | SEQ ID NO: 768 | NY009 | Phyllitis scolopendium |
| | | | ‘Angustifolia’ |
| PtIP-83Fi- | SEQ ID NO: 769 | NY009 | Phyllitis scolopendium |
| like | | | ‘Angustifolia’ |

[0470] cDNA was generated from source organisms with identified homologs by reverse transcription from total RNA. Homologs were PCR amplified from their respective cDNAs using primers designed to the coding sequences of each homolog and subcloned into a plant transient vector containing the DMMV promoter. Cloned PCR products were confirmed by sequencing. Cloning primers are shown in Table 8. The cDNA for homolog PtIP-83Fb was synthesized (SEQ ID NO: 717) based on the transcriptome assembly of PS-9319 and subcloned into a plant transient vector.

TABLE 8

| Gene | Primer | Sequence |
|---|---|---|
| PtIP-83Cb | GZ-550- | CGAAATCTCTCATCTAAGAGGCTGGATCCTAGGATGGATTACAGCAC |
| | 83Ca-F | GCTTTACAGGGAC (SEQ ID NO: 608) |
| PtIP-83Cb | GZ-550- | TTAAGTTGGCCAATCCAGAAGATGGACAAGTCTAGACTACTCCTCCT |
| | 83Ca-R | CTTGCCGCCAGTC (SEQ ID NO: 609) |
| PtIP-83Ca, Cc, and | GZ-550- | CGAAATCTCTCATCTAAGAGGCTGGATCCTAGGATGGATTACAGCAC |
| Cd | 83Ca-F | GCTTTACAGGGAC (SEQ ID NO: 608) |
| PtIP-83Ca, Cc, and | 83Ca-1s-R | CAA GGA TTG CAT TGC TAG GAA GG (SEQ ID NO: 611) |
| Cd | | |
| PtIP-83Ca, Cc, and | GZ-550- | TTAAGTTGGCCAATCCAGAAGATGGACAAGTCTAGACTACTCCTCCT |
| Cd | 83Ca-R | CTTGCCGCCAGTC (SEQ ID NO: 609) |
| PtIP-83Ca, Cc, and | 83Ca-1s | CCTTCCTAGCAATGCAATCCTTG (SEQ ID NO: 613) |
| Cd | | |
| PtIP-83Ce | GZ-550- | CGAAATCTCTCATCTAAGAGGCTGGATCCTAGGATGGATTACAGCAC |
| | 83Ca-F | GCTTTACAGGGAC (SEQ ID NO: 608) |
| PtIP-83Ce | 550- | AAGTTGGCCAATCCAGAAGATGGACAAGTCTAGACTACTCCTCCTCT |
| | 12345-R | TTCTCCTCCTGCC (SEQ ID NO: 615) |
| PtIP-83Cf | 550-9224- | CGAAATCTCTCATCTAAGAGGCTGGATCCTAGGATGGCCAGTGTACT |
| | F1 | GGATTACAGCAC (SEQ ID NO: 616) |
| PtIP-83Cf | 550-9224- | TTAAGTTGGCCAATCCAGAAGATGGACAAGTCTAGACTACTCCTCCT |
| | R1 | CGTGCCGCC (SEQ ID NO: 617) |
| PtIP-83Cg | 550- | GAAATCTCTCATCTAAGAGGCTGGATCCTAGGATGGATTACAGCACT |
| | 11790.2-F | CTTTACAGGGATC (SEQ ID NO: 618) |
| PtIP-83Cg | GZ-550- | TTAAGTTGGCCAATCCAGAAGATGGACAAGTCTAGACTACTCCTCCT |
| | 83Ca-R | CTTGCCGCCAGTC (SEQ ID NO: 609) |
| PtIP-83Da | GZ-550- | CGAAATCTCTCATCTAAGAGGCTGGATCCTAGGATGGATTACAGCAC |
| | 83Ca-F | GCTTTACAGGGAC (SEQ ID NO: 608) |
| PtIP-83Da | 550- | GTTGGCCAATCCAGAAGATGGACAAGTCTAGATTAGAGTGGCTTCGC |
| | UTR8.7-R | CAGTGTCG (SEQ ID NO: 621) |
| PtIP-83Ea | GZ-550- | CGAAATCTCTCATCTAAGAGGCTGGATCCTAGGATGGATTACAGCAC |
| | 83Ca-F | GCTTTACAGGGAC (SEQ ID NO: 608) |
| PtIP-83Ea | 550- | AAGTTGGCCAATCCAGAAGATGGACAAGTCTAGACTACTCCTCCTCT |
| | 12345-R | TTCTCCTCCTGCC (SEQ ID NO: 615) |
| PtIP-83Eb | GZ-550- | CGAAATCTCTCATCTAAGAGGCTGGATCCTAGGATGGATTACAGCAC |
| | 83Ca-F | GCTTTACAGGGAC (SEQ ID NO: 608) |
| PtIP-83Eb | 550- | AAGTTGGCCAATCCAGAAGATGGACAAGTCTAGACTACTCCTCCTCT |
| | 12345-R | TTCTCCTCCTGCC (SEQ ID NO: 615) |
| PtIP-83Fa | infusion | TTTAACTTAGCCTAGGATCCATGGAATATAGCAGCTTGTAC |
| | bamHI | (SEQ ID NO: 32) |
| PtIP-83Fa | infusion | ACTCCTTCTTTAGTTAACTTACTCCACATCACCCTCTTGTCG |
| | Hpal | (SEQ ID NO: 33) |
| PtIP-83Ch and | LW13327- | cgaaatctctcatctaagaggctggatcctaggATGGATTACAGCACGCTTTACA |
| PtIP-83Ch-like | F1 | GG (SEQ ID NO: 770) |
| PtIP-83Ch and | LW13327- | taagttggccaatccagaagatggacaagtctagaCTACTCCTCCACCTCCTGCCT |
| PtIP-83Ch-like | R1 | CC (SEQ ID NO: 771) |
| PtIP-83Fd and | LW13327- | cgaaatctctcatctaagaggctggatcctaggATGACGATGGCGGCAACTG |
| PtIP-83Fe | F2 | (SEQ ID NO: 772) |
| PtIP-83Fd and | LW13327- | ggccaatccagaagatggacaagtctagaCTAGAAAGAAATTTTCCTGATAGC |
| PtIP-83Fe | R2 | TGAG (SEQ ID NO: 773) |
| PtIP-83Ci and PtIP- | LW12354- | cgaaatctctcatctaagaggctggatcctaggATGGATTACAGCACTCTTTACA |
| 83Ci-like | F1 | CGG (SEQ ID NO: 774) |
| PtIP-83Ci and PtIP- | LW12354- | taagttggccaatccagaagatggacaagtctagaCTACTCCTCTTGCCGCCAGT |
| 83Ci-like | R1 | C (SEQ ID NO: 775) |
| PtIP-83Ff and PtIP- | LW12354- | cgaaatctctcatctaagaggctggatcctaggATGGCTGCCTCCGCTGCTG |
| 83Ff-like | F2 | (SEQ ID NO: 776) |
| PtIP-83Ff and PtIP- | LW12354- | taagttggccaatccagaagatggacaagtctagaCTAGAAAGAAATGCGCCGG |
| 83Ff-like | R2 | ATAG (SEQ ID NO: 777) |
| PtIP-83Cj and PtIP- | NY012-F1 | cgaaatctctcatctaagaggctggatcctaggATGGATTACAGCACGCTTTACA |
| 83Cj-like | | GG (SEQ ID NO: 778) |
| PtIP-83Cj and PtIP- | NY012-R1 | taagttggccaatccagaagatggacaagtctagaCTACTCCTCCTCCTCCTCGTG |
| 83Cj-like | | CC (SEQ ID NO: 779) |
| PtIP-83Ga and | NY009-F1 | cgaaatctctcatctaagaggctggatcctaggATGGGTGTCACAGTCGTTAGC |
| PtIP-83Ga-like | | G (SEQ ID NO: 780) |
| PtIP-83Ga and | NY009-R1 | taagttggccaatccagaagatggacaagtctagaTTAGCTGACGACCTGATCAT |
| PtIP-83Ga-like | | CGC (SEQ ID NO: 781) |
| PtIP-83Fg, Fi, and | NY009-F2 | cgaaatctctcatctaagaggctggatcctaggATGGAGTATGGCAGCTTGTAT |
| Fi-like | | GG (SEQ ID NO: 782) |
| PtIP-83Fg, Fi, and | NY009- | gttggccaatccagaagatggacaagtctagaCTATAACTCCGCATCAGCTCGTT |
| Fi-like | R2a | G (SEQ ID NO: 783) |
| PtIP-83Fh | NY009-F3 | cgaaatctctcatctaagaggctggatcctaggATGGAGTACTCCGACTTGTATG |
| | | AGG (SEQ ID NO: 784) |
| PtIP-83Fh | NY009-R3 | taagttggccaatccagaagatggacaagtctagaTCACTCCTCATCGACTTCCC |
| | | G (SEQ ID NO: 785) |

[0471] Additional diversity was recovered by PCR amplification with primers designed to the non-coding regions flanking identified homologs. Primers were designed to conserved sequences in the 5′ and 3′ untranslated regions of PtIP-83Ca BLAST hits within the DUPONT PIONEER internal transcriptome database. Primers pairs (1) GCCTTTATCGACTCCTAATTCACACC (SEQ ID NO: 626) and CCACATTGTGCATTACGACCAC (SEQ ID NO: 627), and (2) CCAGTGATTTGAGTTCCTTCATTATG (SEQ ID NO: 628) and GAACAGTACATTGACTGCATGTGC (SEQ ID NO: 629) were used to generate PCR products from PS-11481 and PS-12345 cDNA. Resulting PCR products were blunt end cloned using the Zero Blunt® TOPO® PCR Cloning Kit (Invitrogen) and sequence analyzed. From this analysis, homologs PtIP-83Cg, Da, Ea, and Eb were identified and subcloned into the plant transient vector. Cloning primers are shown in Table 8.

[0472] The amino acid sequence identity of the PtIP-83Aa homologs as calculated using the Needleman-Wunsch algorithm, as implemented in the Needle program (EMBOSS tool suite) are shown in Table 9a-9c.

TABLE 9a

| | PtIP-83Ca | PtIP-83Cb | PtIP-83Cc | PtIP-83Cd | PtIP-83Ce | PtIP-83Cf | PtIP-83Cg | PtIP-83Ch-like | PtIP-83Ch | PtIP-83Ci-like |
|---|---|---|---|---|---|---|---|---|---|---|
| | SEQ ID | SEQ ID | SEQ ID | SEQ ID | SEQ ID | SEQ ID | SEQ ID | SEQ ID | SEQ ID | SEQ ID |
| | NO: 5 | NO: 7 | NO: 9 | NO: 11 | NO: 13 | NO: 15 | NO: 17 | NO: 755 | NO: 754 | NO: 759 |
| PtIP-83Aa | 71.4 | 71.2 | 71.9 | 72.0 | 71.5 | 77.4 | 71.5 | 74.8 | 74.8 | 70.9 |
| SEQ ID NO: 1 | | | | | | | | | | |
| PtIP-83Ca | — | 76.4 | 98.5 | 98.2 | 98.0 | 79.3 | 76.6 | 80.6 | 80.6 | 75.8 |
| SEQ ID NO: 5 | | | | | | | | | | |
| PtIP-83Cb | — | — | 76.7 | 76.8 | 76.3 | 77.6 | 98.6 | 78.0 | 78.0 | 96.6 |
| SEQ ID NO: 7 | | | | | | | | | | |
| PtIP-83Cc | — | — | — | 99.8 | 99.5 | 79.1 | 76.9 | 80.8 | 80.8 | 75.8 |
| SEQ ID NO: 9 | | | | | | | | | | |
| PtIP-83Cd | — | — | — | — | 99.3 | 79.3 | 76.9 | 80.9 | 80.9 | 75.8 |
| SEQ ID NO: 11 | | | | | | | | | | |
| PtIP-83Ce | — | — | — | — | — | 78.7 | 76.5 | 80.6 | 80.6 | 75.6 |
| SEQ ID NO: 13 | | | | | | | | | | |
| PtIP-83Cf | — | — | — | — | — | — | 77.8 | 84.0 | 84.0 | 77.3 |
| SEQ ID NO: 15 | | | | | | | | | | |
| PtIP-83Cg | — | — | — | — | — | — | — | 78.2 | 78.2 | 97.1 |
| SEQ ID NO: 17 | | | | | | | | | | |
| PtIP-83Ch-like | — | — | — | — | — | — | — | — | 99.9 | 77.4 |
| SEQ ID NO: 755 | | | | | | | | | | |
| PtIP-83Ch | — | — | — | — | — | — | — | — | — | 77.4 |
| SEQ ID NO: 754 | | | | | | | | | | |
| PtIP-83Ci-like | — | — | — | — | — | — | — | — | — | — |
| SEQ ID NO: 759 | | | | | | | | | | |
| PtIP-83Ci | — | — | — | — | — | — | — | — | — | — |
| SEQ ID NO: 758 | | | | | | | | | | |
| PtIP-83Cj-like | — | — | — | — | — | — | — | — | — | — |
| SEQ ID NO: 763 | | | | | | | | | | |
| PtIP-83Cj | — | — | — | — | — | — | — | — | — | — |
| SEQ ID NO: 762 | | | | | | | | | | |
| PtIP-83Da | — | — | — | — | — | — | — | — | — | — |
| SEQ ID NO: 19 | | | | | | | | | | |
| PtIP-83Ea | — | — | — | — | — | — | — | — | — | — |
| SEQ ID NO: 21 | | | | | | | | | | |
| PtIP-83Eb | — | — | — | — | — | — | — | — | — | — |
| SEQ ID NO: 23 | | | | | | | | | | |
| PtIP-83Fa | — | — | — | — | — | — | — | — | — | — |
| SEQ ID NO: 3 | | | | | | | | | | |
| PtIP-83Fb | — | — | — | — | — | — | — | — | — | — |
| SEQ ID NO: 716 | | | | | | | | | | |
| PtIP-83Fd | — | — | — | — | — | — | — | — | — | — |
| SEQ ID NO: 756 | | | | | | | | | | |
| PtIP-83Fe | — | — | — | — | — | — | — | — | — | — |
| SEQ ID NO: 757 | | | | | | | | | | |
| PtIP-83Ff-like | — | — | — | — | — | — | — | — | — | — |
| SEQ ID NO: 761 | | | | | | | | | | |
| PtIP-83Ff | — | — | — | — | — | — | — | — | — | — |
| SEQ ID NO: 760 | | | | | | | | | | |
| PtIP-83Fg | — | — | — | — | — | — | — | — | — | — |
| SEQ ID NO: 766 | | | | | | | | | | |
| PtIP-83Fh | — | — | — | — | — | — | — | — | — | — |
| SEQ ID NO: 767 | | | | | | | | | | |
| PtIP-83Fi-like | — | — | — | — | — | — | — | — | — | — |
| SEQ ID NO: 769 | | | | | | | | | | |
| PtIP-83Fi | — | — | — | — | — | — | — | — | — | — |
| SEQ ID NO: 768 | | | | | | | | | | |
| PtIP-83Ga-like | — | — | — | — | — | — | — | — | — | — |
| SEQ ID NO: 765 | | | | | | | | | | |

TABLE 9b

| | PtIP-83Ci | PtIP-83q-like | PtIP-83Cj | PtIP-83Da | PtIP-83Ea | PtIP-83Eb | PtIP-83Fa | PtIP-83Fb | PtIP-83Fd |
|---|---|---|---|---|---|---|---|---|---|
| | SEQ ID | SEQ ID | SEQ ID | SEQ ID | SEQ ID | SEQ ID | SEQ ID | SEQ ID | SEQ ID |
| | NO: 758 | NO: 763 | NO: 762 | NO: 19 | NO: 21 | NO: 23 | NO: 3 | NO: 716 | NO: 756 |
| PtIP-83Aa | 71.0 | 75.5 | 73.6 | 64.7 | 55.8 | 55.4 | 49.8 | 50.1 | 50.8 |
| SEQ ID NO: 1 | | | | | | | | | |
| PtIP-83Ca | 75.9 | 79.5 | 77.5 | 89.7 | 68.6 | 79.1 | 48.8 | 48.3 | 48.8 |
| SEQ ID NO: 5 | | | | | | | | | |
| PtIP-83Cb | 96.7 | 79.5 | 77.2 | 68.8 | 59.3 | 60.2 | 49.7 | 49.3 | 50.4 |
| SEQ ID NO: 7 | | | | | | | | | |
| PtIP-83Cc | 76.0 | 79.8 | 77.8 | 91.1 | 70.1 | 80.4 | 49.2 | 48.7 | 49.1 |
| SEQ ID NO: 9 | | | | | | | | | |
| PtIP-83Cd | 76.0 | 79.9 | 77.9 | 90.8 | 70.1 | 80.2 | 49.2 | 48.7 | 49.2 |
| SEQ ID NO: 11 | | | | | | | | | |
| PtIP-83Ce | 75.7 | 79.8 | 77.8 | 90.7 | 70.5 | 80.9 | 49.3 | 48.8 | 48.9 |
| SEQ ID NO: 13 | | | | | | | | | |
| PtIP-83Cf | 77.4 | 87.1 | 84.8 | 71.4 | 60.5 | 61.8 | 49.3 | 48.9 | 52.8 |
| SEQ ID NO: 15 | | | | | | | | | |
| PtIP-83Cg | 97.2 | 79.6 | 77.4 | 69.1 | 59.3 | 60.4 | 49.5 | 49.4 | 50.5 |
| SEQ ID NO: 17 | | | | | | | | | |
| PtIP-83Ch-like | 77.6 | 84.9 | 82.6 | 72.5 | 62.5 | 62.9 | 50.6 | 50.6 | 52.5 |
| SEQ ID NO: 755 | | | | | | | | | |
| PtIP-83Ch | 77.6 | 84.9 | 82.6 | 72.5 | 62.5 | 62.9 | 50.6 | 50.7 | 52.5 |
| SEQ ID NO: 754 | | | | | | | | | |
| PtIP-83Ci-like | 99.9 | 79.0 | 76.8 | 68.1 | 58.9 | 59.9 | 49.9 | 49.8 | 49.3 |
| SEQ ID NO: 759 | | | | | | | | | |
| PtIP-83Ci | — | 79.1 | 76.9 | 68.2 | 59.1 | 59.9 | 50.1 | 49.9 | 49.4 |
| SEQ ID NO: 758 | | | | | | | | | |
| PtIP-83Cj-like | — | — | 97.0 | 71.7 | 61.1 | 62.7 | 50.7 | 50.7 | 51.5 |
| SEQ ID NO: 763 | | | | | | | | | |
| PtIP-83Cj | — | — | — | 69.7 | 61.6 | 60.7 | 50.3 | 50.3 | 50.4 |
| SEQ ID NO: 762 | | | | | | | | | |
| PtIP-83Da | — | — | — | — | 61.4 | 71.7 | 43.5 | 43.0 | 44.4 |
| SEQ ID NO: 19 | | | | | | | | | |
| PtIP-83Ea | — | — | — | — | — | 51.6 | 38.7 | 38.6 | 38.7 |
| SEQ ID NO: 21 | | | | | | | | | |
| PtIP-83Eb | — | — | — | — | — | — | 38.8 | 38.2 | 37.9 |
| SEQ ID NO: 23 | | | | | | | | | |
| PtIP-83Fa | — | — | — | — | — | — | — | 97.1 | 48.4 |
| SEQ ID NO: 3 | | | | | | | | | |
| PtIP-83Fb | — | — | — | — | — | — | — | — | 48.7 |
| SEQ ID NO: 716 | | | | | | | | | |
| PtIP-83Fd | — | — | — | — | — | — | — | — | — |
| SEQ ID NO: 756 | | | | | | | | | |
| PtIP-83Fe | — | — | — | — | — | — | — | — | — |
| SEQ ID NO: 757 | | | | | | | | | |
| PtIP-83Ff-like | — | — | — | — | — | — | — | — | — |
| SEQ ID NO: 761 | | | | | | | | | |
| PtIP-83Ff | — | — | — | — | — | — | — | — | — |
| SEQ ID NO: 760 | | | | | | | | | |
| PtIP-83Fg | — | — | — | — | — | — | — | — | — |
| SEQ ID NO: 766 | | | | | | | | | |
| PtIP-83Fh | — | — | — | — | — | — | — | — | — |
| SEQ ID NO: 767 | | | | | | | | | |
| PtIP-83Fi-like | — | — | — | — | — | — | — | — | — |
| SEQ ID NO: 769 | | | | | | | | | |
| PtIP-83Fi | — | — | — | — | — | — | — | — | — |
| SEQ ID NO: 768 | | | | | | | | | |
| PtIP-83Ga-like | — | — | — | — | — | — | — | — | — |
| SEQ ID NO: 765 | | | | | | | | | |

TABLE 9c

| | PtIP-83Fe | PtIP-83Ff-like | PtIP-83Ff | PtIP-83Fg | PtIP-83Fh | PtIP-83Fi-like | PtIP-83Fi | PtIP-83Ga-like | PtIP-83Ga |
|---|---|---|---|---|---|---|---|---|---|
| | SEQ ID | SEQ ID | SEQ ID | SEQ ID | SEQ ID | SEQ ID | SEQ ID | SEQ ID | SEQ ID |
| | NO: 757 | NO: 761 | NO: 760 | NO: 766 | NO: 767 | NO: 769 | NO: 768 | NO: 765 | NO: 764 |
| PtIP-83Aa | 51.0 | 51.1 | 50.8 | 49.8 | 47.3 | 50.2 | 50.2 | 34.5 | 34.6 |
| SEQ ID NO: 1 | | | | | | | | | |
| PtIP-83Ca | 49.0 | 49.2 | 49.2 | 47.8 | 45.6 | 47.4 | 47.4 | 35.0 | 35.1 |
| SEQ ID NO: 5 | | | | | | | | | |
| PtIP-83Cb | 50.5 | 51.0 | 51.0 | 48.0 | 47.3 | 47.4 | 47.4 | 34.5 | 34.6 |
| SEQ ID NO: 7 | | | | | | | | | |
| PtIP-83Cc | 49.2 | 49.7 | 49.7 | 48.1 | 46.0 | 47.6 | 47.6 | 35.0 | 35.1 |
| SEQ ID NO: 9 | | | | | | | | | |
| PtIP-83Cd | 49.3 | 49.8 | 49.8 | 48.2 | 46.1 | 47.7 | 47.7 | 35.1 | 35.2 |
| SEQ ID NO: 11 | | | | | | | | | |
| PtIP-83Ce | 49.0 | 49.5 | 49.5 | 48.2 | 46.0 | 47.7 | 47.7 | 35.0 | 35.1 |
| SEQ ID NO: 13 | | | | | | | | | |
| PtIP-83Cf | 52.5 | 51.5 | 51.5 | 49.7 | 48.3 | 49.3 | 49.3 | 35.5 | 35.6 |
| SEQ ID NO: 15 | | | | | | | | | |
| PtIP-83Cg | 50.7 | 50.4 | 50.4 | 47.8 | 46.9 | 47.2 | 47.2 | 34.5 | 34.6 |
| SEQ ID NO: 17 | | | | | | | | | |
| PtIP-83Ch-like | 52.4 | 51.5 | 51.6 | 49.7 | 48.4 | 49.4 | 49.4 | 34.6 | 34.7 |
| SEQ ID NO: 755 | | | | | | | | | |
| PtIP-83Ch | 52.4 | 51.5 | 51.6 | 49.7 | 48.1 | 49.7 | 49.7 | 34.7 | 34.8 |
| SEQ ID NO: 754 | | | | | | | | | |
| PtIP-83Ci-like | 49.9 | 50.9 | 50.5 | 47.9 | 47.0 | 47.6 | 47.6 | 34.6 | 34.7 |
| SEQ ID NO: 759 | | | | | | | | | |
| PtIP-83Ci | 50.1 | 51.0 | 50.7 | 48.0 | 47.1 | 47.7 | 47.7 | 34.5 | 34.6 |
| SEQ ID NO: 758 | | | | | | | | | |
| PtIP-83Cj-like | 51.5 | 51.5 | 51.5 | 49.3 | 46.7 | 49.2 | 49.2 | 35.2 | 35.3 |
| SEQ ID NO: 763 | | | | | | | | | |
| PtIP-83Cj | 50.4 | 50.2 | 50.2 | 48.9 | 46.1 | 48.8 | 48.8 | 34.8 | 34.9 |
| SEQ ID NO: 762 | | | | | | | | | |
| PtIP-83 Da | 44.6 | 44.6 | 44.6 | 42.5 | 40.5 | 42.0 | 42.0 | 30.5 | 30.6 |
| SEQ ID NO: 19 | | | | | | | | | |
| PtIP-83 Ea | 38.6 | 38.7 | 38.7 | 39.6 | 36.9 | 39.3 | 39.3 | 29.0 | 29.1 |
| SEQ ID NO: 21 | | | | | | | | | |
| PtIP-83 Eb | 38.1 | 38.7 | 38.7 | 36.6 | 36.1 | 36.4 | 36.4 | 27.4 | 27.5 |
| SEQ ID NO: 23 | | | | | | | | | |
| PtIP-83 Fa | 48.3 | 48.9 | 49.5 | 73.4 | 64.6 | 71.9 | 71.9 | 31.8 | 31.9 |
| SEQ ID NO: 3 | | | | | | | | | |
| PtIP-83Fb | 48.8 | 48.9 | 48.9 | 73.0 | 64.3 | 71.8 | 71.8 | 31.9 | 32.0 |
| SEQ ID NO: 716 | | | | | | | | | |
| PtIP-83Fd | 96.5 | 72.9 | 73.0 | 49.9 | 47.7 | 49.2 | 49.3 | 33.8 | 33.7 |
| SEQ ID NO: 756 | | | | | | | | | |
| PtIP-83Fe | — | 72.9 | 73.0 | 50.0 | 47.7 | 49.2 | 49.3 | 33.5 | 33.4 |
| SEQ ID NO: 757 | | | | | | | | | |
| PtIP-83Ff-like | — | — | 99.9 | 49.1 | 46.5 | 48.4 | 48.5 | 33.1 | 33.1 |
| SEQ ID NO: 761 | | | | | | | | | |
| PtIP-83Ff | — | — | — | 49.1 | 46.5 | 48.4 | 48.5 | 33.2 | 33.2 |
| SEQ ID NO: 760 | | | | | | | | | |
| PtIP-83Fg | — | — | — | — | 66.4 | 94.8 | 94.9 | 31.8 | 31.9 |
| SEQ ID NO: 766 | | | | | | | | | |
| PtIP-83Fh | — | — | — | — | — | 65.3 | 65.4 | 31.1 | 31.1 |
| SEQ ID NO: 767 | | | | | | | | | |
| PtIP-83Fi-like | — | — | — | — | — | — | 99.9 | 32.1 | 32.2 |
| SEQ ID NO: 769 | | | | | | | | | |
| PtIP-83Fi | — | — | — | — | — | — | — | 32.2 | 32.3 |
| SEQ ID NO: 768 | | | | | | | | | |
| PtIP-83Ga-like | — | — | — | — | — | — | — | — | 99.9 |
| SEQ ID NO: 765 | | | | | | | | | |

### Example 4

### Transient Expression in Leaves and Insect Bioassay

[0473] To confirm activity of PtIP-83Aa (SEQ ID NO: 1) a transient expression system under control of a viral promoter pDMMV and/or AtUBQ10 (Dav, et. al., (1999) Plant Mol. Biol. 40:771-782; Norris S R et al (1993) Plant Mol Biol. 21(5):895-906) was utilized. The agro-infiltration method of introducing an Agrobacterium cell suspension to plant cells of intact tissues so that reproducible infection and subsequent plant derived transgene expression may be measured or studied is well known in the art (Kapila, et. al., (1997) Plant Science 122:101-108). Briefly, the unifoliate stage of bush bean (common bean, Phaseolus vulgaris) or soybean (Glycine max), were agro-infiltrated with normalized bacterial cell cultures of test and control strains. After 4 to 7 days leaf disks were excised from each plantlet and infested with 2 neonates of Soybean Looper (SBL) (Chrysodeixis includens), 2 neonates of Corn Earworm (CEVV) (Helicoverpa zea), 2 neonates of Fall Armyworm (Spodoptera frugiperda) or 4 neonates of European Corn Borer (ECB) (Ostrinia nubilalis) alone. Control leaf discs were generated with Agrobacterium containing only a DsRed2 fluorescence marker (Clontech™, 1290 Terra Bella Ave. Mountain View, Calif. 94043) expression vector. Leaf discs from non-infiltrated plants were included as a second control. The consumption of green leaf tissue was scored two (CEW, FAW) or three (ECB, SBL, FAW) days after infestation and given scores of 0 to 9. The transiently expressed PtIP-83Aa (SEQ ID NO: 1), protected leaf discs from consumption by the infested insects while total green tissue consumption was observed for the negative control and untreated tissue (Table 10). Transient protein expression of PtIP-83Aa (SEQ ID NO: 1) was confirmed by mass spectrometry-based protein identification using trypsinized protein extracts of infiltrated leaf tissues (Patterson, (1998) 10(22):1-24, Current Protocol in Molecular Biology published by John Wiley & Son Inc). Transient expression can be verified by using HA or EPEA tagged PtIP-83 polypeptides by western analysis of the HA or EPEA tags.

TABLE 10

| | |
|---|---|
| Transient | Leaf Disc Consumption (Scale 1 to 9) |

| expression | FAW | CEW | SBL | ECB |
|---|---|---|---|---|
| PtIP-83Aa | 8.3 | 8.3 | 8.6 | 8.9 |

| Value | Description |
|---|---|
| 1 | leaf disk is greater than 90% consumed |
| 2 | leaf disk is 70-80% consumed |
| 3 | leaf disk is 60-70% consumed |
| 4 | leaf disk is 50-60% consumed |
| 5 | leaf disk is 40-50% consumed |
| 6 | leaf disk is less than 30% consumed |
| 7 | leaf disk is less than 10% consumed |
| 8 | leaf disk has only a few pinholes |
| 9 | leaf disk is untouched by the insect |

[0474] Activity of PtIP-83Fa (SEQ ID NO: 4) was validated using the bush bean transient expression system and found to be comparable to PtIP-83Aa (SEQ ID NO: 2). PtIP-83Fa (SEQ ID NO: 4) showed a similar insecticidal activity spectrum except for lacking activity against FAW (Table 11).

TABLE 11

| | |
|---|---|
| Transient | Leaf Disc Consumption (Scale 1 to 9) |

| experiment | FAW | CEW | SBL | ECB |
|---|---|---|---|---|
| PtIP-83Fa | 1.0 | 6.8 | 8.1 | 7.4 |
| Vector control | 1.7 | 2.3 | 1.1 | 1.8 |
| blank | 1.0 | 1.1 | 1.4 | 1.0 |

[0475] Activity of PtIP-83Ca (SEQ ID NO: 5), PtIP-83Cb (SEQ ID NO: 7), PtIP-83Cc (SEQ ID NO: 9), PtIP-83Cd (SEQ ID NO: 11), PtIP-83Ce (SEQ ID NO: 13), PtIP-83Cf (SEQ ID NO: 15), PtIP-83Cg (SEQ ID NO: 17), PtIP-83Da (SEQ ID NO: 19), PtIP-83Ea (SEQ ID NO: 21), PtIP-83Eb (SEQ ID NO: 23), PtIP-83Fb (SEQ ID NO: 716), PtIP-83Ch (SEQ ID NO: 754), PtIP-83Ch-like (SEQ ID NO: 755), PtIP-83Fd (SEQ ID NO: 756), PtIP-83Fe (SEQ ID NO: 757), PtIP-83Ci (SEQ ID NO: 758), PtIP-83Ci-like (SEQ ID NO: 759), PtIP-83Ff (SEQ ID NO: 760), PtIP-83Ff-like (SEQ ID NO: 761), and other polypeptides as shown in Table 12 were also validated using a bush bean transient expression system. The activity spectra for all PtIP-83 homologs are summarized in Table 12, where a “+” indicates an average activity score of <=60% of leaf disc consumed, a “−” indicates an average activity score of .>=60% leaf disc consumed, and “ND” indicates not determined.

TABLE 12

| | SEQ ID NO: | FAW | CEW | SBL | ECB |
|---|---|---|---|---|---|
| PtIP-83Aa | 1 | + | + | + | + |
| PtIP-83Ca | 5 | − | + | + | + |
| PtIP-83Cb | 7 | + | + | + | − |
| PtIP-83Cc | 9 | + | + | + | + |
| PtIP-83Cd | 11 | + | + | + | + |
| PtIP-83Ce | 13 | − | + | + | + |
| PtIP-83Cf | 15 | − | − | + | − |
| PtIP-83Cg | 17 | + | + | + | + |
| PtIP-83Da | 19 | − | − | − | − |
| PtIP-83Ea | 21 | − | − | − | + |
| PtIP-83Eb | 23 | − | − | − | − |
| PtIP-83Fa | 3 | − | + | + | + |
| PtIP-83Fb | 716 | | + | + | + |
| PtIP-83Ch | 754 | − | − | − | + |
| PtIP-83Ch- | 755 | − | − | − | + |
| like | | | | | |
| PtIP-83Fd | 756 | − | − | + | − |
| PtIP-83Fe | 757 | − | − | − | − |
| PtIP-83Ci | 758 | + | + | + | + |
| PtIP-83Ci- | 759 | + | + | + | + |
| like | | | | | |
| PtIP-83Ff | 760 | − | − | − | − |
| PtIP-83Ff- | 761 | + | − | + | + |
| like | | | | | |
| PtIP-83Fk | 958 | − | + | + | ND |
| PtIP-83Fl | 959 | + | + | + | + |
| PtIP-83Fm | 960 | + | + | − | ND |
| PtIP-83Fn | 961 | + | + | − | ND |
| PtIP-83Cl | 962 | + | + | + | + |
| PtIP-83Cm | 963 | + | + | + | − |
| PtIP-83Cn | 964 | + | + | + | − |
| PtIP-83Co | 965 | − | − | + | + |
| PtIP-83Fj | 966 | − | − | − | + |
| PtIP-83Fo | 967 | + | − | − | + |
| PtIP-83Gb | 968 | + | + | + | + |
| PtIP-83Fp | 969 | − | − | − | − |
| PtIP-83Fq | 970 | − | − | − | − |
| PtIP-83Fr | 971 | − | − | − | − |
| PtIP-83Fs | 972 | − | − | − | + |
| PtIP-83Ft | 973 | − | − | − | + |
| PtIP-83Gc | 974 | − | − | − | − |
| PtIP-83Fu | 975 | + | − | − | + |
| PtIP-83Ha | 976 | + | − | − | + |
| PtIP-83Gd | 977 | − | − | − | − |
| PtIP-83Hb | 978 | − | − | − | − |
| PtIP-83Cq | 979 | − | − | + | + |
| PtIP-83Cr | 980 | − | − | + | + |
| PtIP-83Cs | 981 | − | − | − | + |
| PtIP-83Ct | 982 | − | − | − | + |
| PtIP-83Cu | 983 | − | − | + | + |
| PtIP-83Cv | 984 | − | − | − | + |
| PtIP-83Cw | 985 | − | − | − | + |
| PtIP-83Cx | 986 | − | − | + | + |
| PtIP-83Ed | 987 | − | − | − | + |
| PtIP-83Ec | 988 | − | − | − | + |
| PtIP-83Fv | 989 | + | − | + | − |
| PtIP-83Fw | 990 | + | − | + | − |
| PtIP-83Fx | 991 | − | − | − | − |
| PtIP-83Fy | 992 | + | − | + | − |
| PtIP-83Fz | 993 | − | − | + | + |
| PtIP-83Faa | 994 | − | − | − | − |
| PtIP-83Hc | 995 | − | − | − | − |
| PtIP-83Fab | 996 | − | − | − | − |
| PtIP-83Gf | 997 | − | − | − | − |
| PtIP-83Gg | 998 | − | − | − | − |
| PtIP-83Gh | 999 | + | − | − | + |
| PtIP-83Gi | 1000 | − | − | − | − |
| PtIP-83Gj | 1001 | − | − | − | − |
| PtIP-83Gk | 1002 | − | + | + | − |
| PtIP-83Fac | 1003 | − | − | − | + |
| PtIP-83Fad | 1004 | − | − | − | + |
| PtIP-83Cy | 1005 | − | − | + | + |
| PtIP-83Fae | 1006 | − | − | − | − |
| PtIP-83Faf | 1007 | − | − | + | + |
| PtIP-83Fah | 1008 | − | − | + | + |
| PtIP-83Fai | 1009 | − | − | − | − |
| PtIP-83Faj | 1010 | − | − | − | − |
| PtIP-83Fak | 1011 | − | − | − | − |
| PtIP-83Fal | 1012 | − | − | − | − |
| PtIP-83Fam | 1013 | − | − | − | − |
| PtIP-83Fan | 1014 | − | − | − | − |
| PtIP-83Fat | 1015 | + | − | + | + |
| PtIP-83Fau | 1016 | + | − | + | + |
| PtIP-83Fav | 1017 | + | − | + | + |
| PtIP-83Faw | 1018 | + | − | + | + |
| PtIP-83Fas | 1019 | + | − | + | + |
| PtIP-83Faq | 1020 | + | + | − | + |
| PtIP-83Fap | 1021 | − | + | − | + |
| PtIP-83Far | 1022 | − | − | − | − |
| PtIP-83Gl | 1023 | − | − | − | − |
| PtIP-83Gm | 1024 | − | − | − | − |
| PtIP-83Gn | 1025 | − | − | − | − |
| PtIP-83Fao | 1026 | − | + | + | + |

### Example 5

### Baculovirus Expression of PtIP-83Aa polypeptides

[0476] The gene encoding PtIP-83Aa SEQ ID NO: 2 was subcloned into the pFastBac™ Dual vector (Invitrogen®) with the stop codon removed for C-terminal translation of a 10x-histidine tag addition (SEQ ID NO: 27) and the sequence of the histidine-tagged PtIP-83Aa polypeptide is set forth as SEQ ID NO: 2. This vector was transformed into DH10Bac cells to generate baculovirus. These baculovirus were used to infect sf9 insect cells and incubated for 72 hours at 27° C. The infected insect cells were harvested by centrifugation. The cell culture pellet was suspended with 100 mL of lysis buffer (1×PBS, 10% glycerol, with protease inhibitor and benzonase) and incubated at 4° C. for 5 min with stirring, then homogenizing twice. The lysate was centrifuged at 16000 rpm for 20 min. The supernatant was saved and loaded onto two 2 mL Ni-NTA Hi-Bind Resin (Novagen, cat #70666) columns pre-equilibrated with Elute buffer (1×PBS, 10% glycerol). The columns were then sequentially eluted with 10 mLof Elute buffer containing 10, 20, 50, and 250 mM of imidazole. Samples were analyzed by SDS-PAGE. The purified fractions (E250) were concentrated using 100K Amicon® Ultra Centrifugal Filters (Millipore) to ˜0.5 mg/mL and demonstrated insecticidal activity against CEW, ECB, FAW and SBL similar to the activity spectrum obtained using transient expressing leaf discs.

### Example 6

### Agrobacterium-Mediated Transformation of Maize and Regeneration of Transgenic Plants

[0477] For Agrobacterium-mediated transformation of maize with PtIP-83 nucleotide sequences such as PtIP-83Aa (SEQ ID NO: 2), PtIP-83Aa ModA (codon optimized) (SEQ ID NO: 28), and PtIP-83Aa ModB (codon optimized (SEQ ID NO: 29), the method of Zhao can be used (U.S. Pat. No. 5,981,840 and PCT Patent Publication Number WO 1998/32326; the contents of which are hereby incorporated by reference). Briefly, immature embryos were isolated from maize and the embryos contacted with a suspension of Agrobacterium under conditions whereby the bacteria are capable of transferring the nucleotide sequence (PtIP-83Aa SEQ ID NO: 2, PtIP-83Aa ModA (codon optimized)—SEQ ID NO: 28, and PtIP-83Aa ModB (codon optimized—SEQ ID NO: 29) to at least one cell of at least one of the immature embryos (step 1: the infection step). In this step the immature embryos can be immersed in an Agrobacterium suspension for the initiation of inoculation. The embryos were co-cultured for a time with the Agrobacterium (step 2: the co-cultivation step). The immature embryos can be cultured on solid medium following the infection step. Following this co-cultivation period an optional “resting” step is contemplated. In this resting step, the embryos were incubated in the presence of at least one antibiotic known to inhibit the growth of Agrobacterium without the addition of a selective agent for plant transformation (step 3: resting step). The immature embryos were cultured on solid medium with antibiotic, but without a selecting agent, for elimination of Agrobacterium and for a resting phase for the infected cells. Next, inoculated embryos were cultured on medium containing a selective agent and growing transformed callus is recovered (step 4: the selection step). The immature embryos were cultured on solid medium with a selective agent resulting in the selective growth of transformed cells. The callus was then regenerated into plants (step 5: the regeneration step), and calli grown on selective medium were cultured on solid medium to regenerate the plants.

### Example 7

### Transformation and Regeneration of Soybean (Glycine max)

[0478] Transgenic soybean lines are generated by the method of particle gun bombardment (Klein et al., Nature (London) 327:70-73 (1987); U.S. Pat. No. 4,945,050) using a BIORAD Biolistic PDS1000/He instrument and either plasmid or fragment DNA. The following stock solutions and media are used for transformation and regeneration of soybean plants:

### Stock Solutions:

[0479] Sulfate 100× Stock:

[0480] 37.0 g MgSO₄.7H₂O, 1.69 g MnSO₄.H₂O, 0.86 g ZnSO₄.7H₂O, 0.0025 g CuSO₄.5H₂O
[0481] Halides 100× Stock:

[0482] 30.0 g CaCl₂.2H₂O, 0.083 g KI, 0.0025 g CoCl₂.6H₂O
[0483] P, B, Mo 100× Stock:

[0484] 18.5 g KH₂PO₄, 0.62 g H₃BO₃, 0.025 g Na₂MoO₄.2H₂O
[0485] Fe EDTA 100× Stock:

[0486] 3.724 g Na₂EDTA, 2.784 g FeSO₄.7H₂O
[0487] 2,4-D Stock:

[0488] 10 mg/mL Vitamin
[0489] B5 vitamins, 1000× Stock:
[0490] 100.0 g myo-inositol, 1.0 g nicotinic acid, 1.0 g pyridoxine HCl, 10 g thiamine.HCL.

### Media (Per Liter):

[0491] SB199 Solid Medium:
[0492] 1 package MS salts (Gibco/BRL—Cat. No. 11117-066), 1 mL B5 vitamins 1000× stock, 30 g Sucrose, 4 ml 2,4-D (40 mg/L final concentration), pH 7.0, 2 gm Gelrite
[0493] SB1 Solid Medium:
[0494] 1 package MS salts (Gibco/BRL—Cat. No. 11117-066), 1 mL B5 vitamins 1000× stock, 31.5 g Glucose, 2 mL 2,4-D (20 mg/L final concentration), pH 5.7, 8 g TC agar
[0495] SB196:
[0496] 10 mL of each of the above stock solutions 1-4, 1 mL B5 Vitamin stock, 0.463 g (NH4)2 SO4, 2.83 g KNO3, 1 mL 2,4 D stock, 1 g asparagine, 10 g Sucrose, pH 5.7
[0497] SB71-4:
[0498] Gamborg's B5 salts, 20 g sucrose, 5 g TC agar, pH 5.7.
[0499] SB103:
[0500] 1 pk. Murashige & Skoog salts mixture, 1 mL B5 Vitamin stock, 750 mg MgCl2 hexahydrate, 60 g maltose, 2 g Gelrite™, pH 5.7.
[0501] SB166:
[0502] SB103 supplemented with 5 g per liter activated charcoal.

### Soybean Embryogenic Suspension Culture Initiation:

[0503] Pods with immature seeds from available soybean plants 45-55 days after planting are picked, removed from their shells and placed into a sterilized magenta box. The soybean seeds are sterilized by shaking them for 15 min in a 5% Clorox® solution with 1 drop of Ivory™ soap (i.e., 95 mL of autoclaved distilled water plus 5 mL Clorox® and 1 drop of soap, mixed well). Seeds are rinsed using 2 L sterile distilled water and those less than 3 mm are placed on individual microscope slides. The small end of the seed is cut and the cotyledons pressed out of the seed coat. Cotyledons are transferred to plates containing SB199 medium (25-30 cotyledons per plate) for 2 weeks, then transferred to SB1 for 2-4 weeks. Plates are wrapped with fiber tape. After this time, secondary embryos are cut and placed into SB196 liquid medium for 7 days.

### Culture Conditions:

[0504] Soy bean embryogenic suspension cultures (cv. 93Y21) were maintained in 50 mL liquid medium SB196 on a rotary shaker, 100-150 rpm, 26° C. on 16:8 h day/night photoperiod at light intensity of 80-100 μE/m2/s. Cultures are subcultured every 7-14 days by inoculating up to ½ dime size quantity of tissue (clumps bulked together) into 50 mL of fresh liquid SB196.

### Preparation of DNA for Bombardment:

[0505] In particle gun bombardment procedures it is possible to use purified 1) entire plasmid DNA; or 2) DNA fragments containing only the recombinant DNA expression cassette(s) of interest. For every seventeen bombardment transformations, 85 μL of suspension is prepared containing 1 to 90 picograms (pg) of plasmid DNA per base pair of each DNA plasmid. DNA plasmids or fragments are co-precipitated onto gold particles as follows. The DNAs in suspension are added to 50 μL of a 10-60 mg/mL 0.6 μm gold particle suspension and then combined with 50 μL CaCl₂ (2.5 M) and 20 μL spermidine (0.1 M). The mixture is vortexed for 5 sec, spun in a microfuge for 5 sec, and the supernatant removed. The DNA-coated particles are then washed once with 150 μL of 100% ethanol, vortexed and spun in a microfuge again, then resuspended in 85 μL of anhydrous ethanol. Five μL of the DNA-coated gold particles are then loaded on each macrocarrier disc.

Tissue Preparation and Bombardment with DNA:

[0506] Approximately 100 mg of two-week-old suspension culture is placed in an empty 60 mm×15 mm petri plate and the residual liquid removed from the tissue using a pipette. The tissue is placed about 3.5 inches away from the retaining screen and each plate of tissue is bombarded once. Membrane rupture pressure is set at 650 psi and the chamber is evacuated to −28 inches of Hg. Following bombardment, the tissue from each plate is divided between two flasks, placed back into liquid media, and cultured as described above.

### Selection of Transformed Embryos and Plant Regeneration:

[0507] After bombardment, tissue from each bombarded plate is divided and placed into two flasks of SB196 liquid culture maintenance medium per plate of bombarded tissue. Seven days post bombardment, the liquid medium in each flask is replaced with fresh SB196 culture maintenance medium supplemented with 100 ng/ml selective agent (selection medium). For selection of transformed soybean cells the selective agent used can be a sulfonylurea (SU) compound with the chemical name, 2-chloro-N-((4-methoxy-6 methy-1,3,5-triazine-2-yl)aminocarbonyl) benzenesulfonamide (common names: DPX-W4189 and chlorsulfuron). Chlorsulfuron is the active ingredient in the DuPont sulfonylurea herbicide, GLEAN®. The selection medium containing SU is replaced every two weeks for 8 weeks. After the 8 week selection period, islands of green, transformed tissue are observed growing from untransformed, necrotic embryogenic clusters. These putative transgenic events are isolated and kept in SB196 liquid medium with SU at 100 ng/ml for another 5 weeks with media changes every 1-2 weeks to generate new, clonally propagated, transformed embryogenic suspension cultures. Embryos spend a total of around 13 weeks in contact with SU. Suspension cultures are subcultured and maintained as clusters of immature embryos and also regenerated into whole plants by maturation and germination of individual somatic embryos.

[0508] Somatic embryos became suitable for germination after four weeks on maturation medium (1 week on SB166 followed by 3 weeks on SB103). They are then removed from the maturation medium and dried in empty petri dishes for up to seven days. The dried embryos are then planted in SB71-4 medium where they are allowed to germinate under the same light and temperature conditions as described above. Germinated embryos are transferred to potting medium and grown to maturity for seed production.

### Example 8

### Particle Bombardment Transformation and Regeneration of Transgenic Plants

[0509] Immature maize embryos from greenhouse donor plants are bombarded with a plasmid containing a nucleotide sequence encoding the insecticidal protein. The ears are husked and surface sterilized in 30% Clorox® bleach plus 0.5% Micro detergent for 20 minutes and rinsed two times with sterile water. The immature embryos are excised and placed embryo axis side down (scutellum side up), 25 embryos per plate, on 560Y medium for 4 hours and then aligned within the 2.5 cm target zone in preparation for bombardment. A plasmid vector DNA comprising the nucleotide sequence encoding the insecticidal protein operably linked to a promoter is precipitated onto 1.1 μm (average diameter) tungsten pellets using a CaCl₂ precipitation procedure as follows: 100 μl prepared tungsten particles in water; 10 μl (1 μg) DNA in Tris EDTA buffer (1 μg total DNA); 100 μl 2.5 M CaCl₂ and 10 μl 0.1 M spermidine.

[0510] Each reagent is added sequentially to the tungsten particle suspension, while maintained on the multitube vortexer. The final mixture is sonicated briefly and allowed to incubate under constant vortexing for 10 minutes. After the precipitation period, the tubes are centrifuged briefly, liquid removed, washed with 500 ml 100% ethanol and centrifuged for 30 seconds. Again the liquid is removed, and 105 μl 100% ethanol is added to the final tungsten particle pellet. For particle gun bombardment, the tungsten/DNA particles are briefly sonicated and 10 μl spotted onto the center of each macrocarrier and allowed to dry about 2 minutes before bombardment. The sample plates are bombarded at level #4 in a particle gun. All samples receive a single shot at 650 PSI, with a total of ten aliquots taken from each tube of prepared particles/DNA

[0511] Following bombardment, the embryos are kept on 560Y medium for 2 days, then transferred to 560R selection medium containing 3 mg/liter Bialaphos, and subcultured every 2 weeks. After approximately 10 weeks of selection, selection-resistant callus clones are transferred to 288J medium to initiate plant regeneration. Following somatic embryo maturation (2-4 weeks), well-developed somatic embryos are transferred to medium for germination and transferred to the lighted culture room. Approximately 7-10 days later, developing plantlets are transferred to 272V hormone-free medium in tubes for 7-10 days until plantlets are well established. Plants are then transferred to inserts in flats (equivalent to 2.5″ pot) containing potting soil and grown for 1 week in a growth chamber, subsequently grown an additional 1-2 weeks in the greenhouse, then transferred to classic 600 pots (1.6 gallon) and grown to maturity. Plants are monitored and scored for expression of a PtIP-83 polypeptide by assays known in the art, such as, for example, immunoassays and Western blotting.

[0512] Transgenic maize plants positive for expression of the insecticidal proteins are tested for pesticidal activity using standard bioassays known in the art. Such methods include, for example, root excision bioassays and whole plant bioassays. See, e.g., US Patent Application Publication Number US 2003/0120054 and International Publication Number WO 2003/018810.

[0513] Bombardment medium (560Y) comprises 4.0 g/l N6 basal salts (SIGMA C-1416), 1.0 ml/l Eriksson's Vitamin Mix (1000.times.SIGMA-1511), 0.5 mg/l thiamine HCl, 120.0 g/l sucrose, 1.0 mg/l 2,4-D and 2.88 g/l L-proline (brought to volume with D-I H₂O following adjustment to pH 5.8 with KOH); 2.0 g/l Gelrite (added after bringing to volume with D-I H₂O) and 8.5 mg/l silver nitrate (added after sterilizing the medium and cooling to room temperature). Selection medium (560R) comprises 4.0 g/l N6 basal salts (SIGMA C-1416), 1.0 ml/l Eriksson's Vitamin Mix (1000.times.SIGMA-1511), 0.5 mg/l thiamine HCl, 30.0 g/l sucrose and 2.0 mg/l 2,4-D (brought to volume with D-I H₂O following adjustment to pH 5.8 with KOH); 3.0 g/l Gelrite (added after bringing to volume with D-I H₂O) and 0.85 mg/l silver nitrate and 3.0 mg/l bialaphos (both added after sterilizing the medium and cooling to room temperature).

[0514] Plant regeneration medium (288J) comprises 4.3 g/l MS salts (GIBCO 11117-074), 5.0 ml/l MS vitamins stock solution (0.100 g nicotinic acid, 0.02 g/l thiamine HCL, 0.10 g/l pyridoxine HCL, and 0.40 g/l glycine brought to volume with polished D-I H₂O) (Murashige and Skoog, (1962) Physiol. Plant. 15:473), 100 mg/l myo-inositol, 0.5 mg/l zeatin, 60 g/l sucrose and 1.0 ml/l of 0.1 mM abscisic acid (brought to volume with polished D-I H₂O after adjusting to pH 5.6); 3.0 g/l Gelrite (added after bringing to volume with D-I H₂O) and 1.0 mg/l indoleacetic acid and 3.0 mg/l bialaphos (added after sterilizing the medium and cooling to 60° C.). Hormone-free medium (272V) comprises 4.3 g/l MS salts (GIBCO 11117-074), 5.0 ml/l MS vitamins stock solution (0.100 g/l nicotinic acid, 0.02 g/l thiamine HCL, 0.10 g/l pyridoxine HCL and 0.40 g/l glycine brought to volume with polished D-I H₂O), 0.1 g/l myo-inositol and 40.0 g/l sucrose (brought to volume with polished D-I H₂O after adjusting pH to 5.6) and 6 g/l bacto-agar (added after bringing to volume with polished D-I H₂O), sterilized and cooled to 60° C.

### Example 9

### Insect Control Efficacy of Stable Transformed Soybean and Corn Plants Against Broad Spectrum of Lepidopteran Insects

[0515] Leaf discs are excised from the transformed plants and tested for insecticidal activity of PtIP-83 polypeptides against the Soy Bean Looper (SBL) (Chrysodeixis includens), Corn Earworm, (CEVV) (Helicoverpa zea), European Corn Borer (ECB) (Ostrinia nubilalis), Velvet Bean Caterpillar (VBC) (Anticarsia gemmatalis) and Fall Armyworm (Spodoptera frugiperda).

### Example 10

### Chimeras Between PtIP-83Aa (SEQ ID NO: 1) and PtIP-50Aa (SEQ ID NO: 34)

[0516] To generate single component active variants with diversified sequences, chimeras between PtIP-83Aa (SEQ ID NO: 1) and PtIP50Aa (SEQ ID NO: 34) were generated by multi-PCR fragments overlap assembly (Gibson Assembly Cloning Kit, New England Biolabs Inc.). A total of 6 chimeras were constructed: Table 13 shows the crossover points and the % sequence identity to PtIP-83Aa (SEQ ID NO: 1).

TABLE 13

| | | | | % Seq. | Soybean |
|---|---|---|---|---|---|
| Chimera | poly- | Beginning | Ending | iden. to | looper |
| Designation | nucleotide | crossover | crossover | PtIP-83Aa | active |
| Chimera 1 | SEQ ID | Q334 | S473 | 94 | No |
| SEQ ID | NO: 634 | | | | |
| NO: 640 | | | | | |
| Chimera 2 | SEQ ID | G469 | N615 | 95 | No |
| SEQ ID | NO: 635 | | | | |
| NO: 641 | | | | | |
| Chimera 3 | SEQ ID | P610 | E713 | 95 | Yes |
| SEQ ID | NO: 636 | | | | |
| NO: 642 | | | | | |
| Chimera 4 | SEQ ID | P754 | E873 | 94 | No |
| SEQ ID | NO: 637 | | | | |
| NO: 643 | | | | | |
| Chimera 5 | SEQ ID | F823 | E873 | 98 | Yes |
| SEQ ID | NO: 638 | | | | |
| NO: 644 | | | | | |
| Chimera 6 | SEQ ID | Q334 | E713 | 85 | No |
| SEQ ID | NO: 639 | | | | |
| NO: 645 | | | | | |

Crossover position numbers are based on the alignment shown in FIG. 3

[0517] The chimera genes were cloned into a plant transient expression vector and SBL activity assays were performed as described in Example 4.

### Example 11

### Identification of Motifs Affecting the Protein Function of PtIP-83Aa

[0518] To identify sequence space affecting protein structural stability and insecticidal function of PtIP-83Aa, five unique motifs were identified by amino acid alignment among PtIP-83Aa, PtIP-50Aa (SEQ ID NO: 34), PtIP-50Ba (SEQ ID NO: 35), PtIP-50Bb (SEQ ID NO: 36), and PtIP-83Fa (SEQ ID NO: 3) (FIG. 4a-4d). Three conserved motifs: amino acids V53-P66 of SEQ ID NO: 1 were defined as Motif A, amino acids Q363-N373 of SEQ ID NO: 1 as Motif B and amino acids W556-A564 of SEQ ID NO: 1 as Motif C. Another two variable motifs were also picked: amino acids L646-W655 of SEQ ID NO: 1 as Motif D and amino acids R771-Y786 of SEQ ID NO: 1 as Motif E. Saturation mutagenesis primers were designed for these five motifs as shown in Table 14, Table 15, Table 16, Table 17 and Table 18. Saturation mutagenesis was performed using Agilent's QuikChange® Lightning Site-Directed Mutagenesis Kit. Mutations were introduced by amplifying a plant expression vector containing the polynucleotide of SEQ ID NO: 2 encoding the PtIP-83Aa polypeptide (SEQ ID NO: 1) using complementing forward and reverse primers containing a NNK degenerate codon at the targeted position. Amino acid substitutions at each targeted position were identified by DNA sequencing. Plant transient expression and SBL activity assays were performed as described in example 4. The amino acid substitutions identified in Motif A, Motif B, Motif C, Motif D, and Motif E of PtIP-83Aa (SEQ ID NO: 1) and the amino acid substitutions with insecticidal activity are shown in Table 14, Table 15, Table 16, Table 17 and Table 18 respectively.

TABLE 14

| Position | Oligo name | Primer | Identified substitutions | Active substitutions † |
|---|---|---|---|---|
| V53 | 083SM-V53-F | SEQ ID NO: 38 | A, C, D, E, F, G, H, K, L, N, | A, C, T |
| | | | P, Q, R, S, T, Y | |
| K54 | 083SM-K54-F | SEQ ID NO: 39 | A, C, D, E, F, G, H, I, L, M, | A, C, D, E, G, H, I, L, |
| | 083SM-K54-R | SEQ ID NO: 40 | N, P, Q, R, S, T, V, W, Y | M, N, Q, R, S, T |
| R55 | 083SM-R55-F | SEQ ID NO: 41 | A, D, E, F, G, H, K, L, M, N, | A, D, E, F, G, H, K, L, |
| | 083SM-R55-R | SEQ ID NO: 42 | P, Q, S, T, V, W, Y | M, N, Q, S, T, V, W, Y |
| L56 | 083SM-L56-F | SEQ ID NO: 43 | A, D, E, F, G, I, M, N, P, Q, | E, F, I, M, T, V |
| | 083SM-L56-R | SEQ ID NO: 44 | R, S, T, V, W, Y | |
| Y57 | 083SM-Y57-F | SEQ ID NO: 45 | A, C, D, E, G, H, I, K, L, M, | C, I, L, M, T, V |
| | 083SM-Y57-R | SEQ ID NO: 46 | N, P, Q, R, S, T, V | |
| V58 | 083SM-V58-F | SEQ ID NO: 47 | A, C, D, F, G, H, I, K, L, N, | C, I, L |
| | 083SM-V58-R | SEQ ID NO: 48 | P, Q, R, S, T, W, Y | |
| F59 | 083SM-F59-F | SEQ ID NO: 49 | A, C, D, E, G, H, I, K, L, M, | L, M, V, Y |
| | 083SM-F59-R | SEQ ID NO: 50 | N, P, Q, R, S, T, V, Y | |
| A60 | 083SM-A60-F | SEQ ID NO: 51 | C, D, E, F, G, H, I, L, M, N, | C, G, S, T, V |
| | 083SM-A60-R | SEQ ID NO: 52 | P, Q, R, S, T, V, Y | |
| D61 | 083SM-D61-F | SEQ ID NO: 53 | C, E, F, G, H, I, K, L, N, P, | E, H, S |
| | 083SM-D61-R | SEQ ID NO: 54 | Q, R, S, T, V, W, Y | |
| V62 | 083SM-V62-F | SEQ ID NO: 55 | A, C, D, E, F, G, H, I, K, L, | A, C, I, L, T |
| | 083SM-V62-R | SEQ ID NO: 56 | M, N, P, R, S, T, Y | |
| V63 | 083SM-V63-F | SEQ ID NO: 57 | A, C, G, H, I, K, L, M, N, P, | A, C, I, L, M, T |
| | 083SM-V63-R | SEQ ID NO: 58 | Q, R, S, T, W, Y | |
| E64 | 083SM-E64-F | SEQ ID NO: 59 | A, C, F, G, H, I, L, M, N, P, | A, C, F, G, H, I, L, M, |
| | 083SM-E64-R | SEQ ID NO: 60 | Q, R, S, T, V, W, Y | N, Q, R, S, T, V, W, Y |
| L65 | 083SM-L65-F | SEQ ID NO: 61 | A, C, D, F, G, H, I, M, N, P, | A, C, F, H, I, M, N, Q, |
| | 083SM-L65-R | SEQ ID NO: 62 | Q, R, S, T, V, W, Y | T, V, W |
| P66 | 083SM-P66-F | SEQ ID NO: 63 | A, C, D, E, F, G, I, K, L, M, | D, G, M, Q, R |
| | 083SM-P66-R | SEQ ID NO: 64 | N, Q, R, S, T, V, W, Y | |

† Active substitutions: average activity score <=60% of leaf disk eaten

TABLE 15

| Position | Oligo name | Primer sequence | Identified substitutions | Active substitutions |
|---|---|---|---|---|
| Q363 | 083SM-Q363-F | SEQ ID NO: 65 | A, C, E, F, G, H, K, L, N, P, | A, C, E, F, G, H, K, L, N, R, |
| | 083SM-Q363-R | SEQ ID NO: 66 | R, S, T, V, W | S, T, V, W |
| I364 | 083SM-I364-F | SEQ ID NO: 67 | A, C, D, E, F, G, H, K, L, M, | A, C, E, F, H, K, L, M, N, Q, |
| | 083SM-I364-R | SEQ ID NO: 68 | N, P, Q, R, S, T, V, W, Y | S, T, V, W, Y |
| L365 | 083SM-L365-F | SEQ ID NO: 69 | A, E, F, G, H, I, K, M, N, P, | A, E, F, G, H, I, K, M, N, R, |
| | 083SM-L365-R | SEQ ID NO: 70 | R, S, T, V, W, Y | V, W, Y |
| G366 | 083SM-G366-F | SEQ ID NO: 71 | A, C, E, F, H, I, K, L, M, N, | A, C, F, H, I, K, L, M, N, S, |
| | 083SM-G366-R | SEQ ID NO: 72 | P, R, S, T, V, W | T, V |
| S367 | 083SM-S367-F | SEQ ID NO: 73 | A, C, D, E, F, G, H, I, L, M, | A, C, D, E, F, G, H, I, L, M, |
| | 083SM-S367-R | SEQ ID NO: 74 | N, P, Q, R, T, V, W | N, P, Q, R, T, V, W |
| Y368 | 083SM-Y368-F | SEQ ID NO: 75 | A, C, D, E, F, G, H, I, K, L, | A, C, D, E, F, G, H, I, K, L, |
| | 083SM-Y368-R | SEQ ID NO: 76 | M, N, P, Q, R, S, T, V, W | M, N, P, Q, R, S, T, V, W |
| L369 | 083SM-L369-F | SEQ ID NO: 77 | A, C, D, F, G, H, I, M, N, P, | A, C, D, F, G, I, M, T, V |
| | 083SM-L369-R | SEQ ID NO: 78 | R, S, T, V | |
| L370 | 083SM-L370-F | SEQ ID NO: 79 | A, C, D, E, F, G, H, I, K, M, | A, C, D, E, F, G, H, I, K, M, |
| | 083SM-L370-R | SEQ ID NO: 80 | N, P, Q, R, S, T, V, W, Y | Q, R, S, T, V, W, Y |
| Q371 | 083SM-Q371-F | SEQ ID NO: 81 | A, C, D, E, F, G, I, K, L, N, | A, C, D, E, F, G, I, K, L, N, |
| | 083SM-Q371-R | SEQ ID NO: 82 | R, S, T, V, W | R, S, T, V, W |
| Q372 | 083SM-Q372-F | SEQ ID NO: 83 | A, C, D, F, G, H, I, L, N, R, | A, C, D, F, G, H, I, L, N, R, |
| | 083SM-Q372-R | SEQ ID NO: 84 | S, T, V, Y | S, V, Y |
| N373 | 083SM-N373-F | SEQ ID NO: 85 | A, C, D, F, G, H, I, K, L, M, | A, C, D, F, G, H, I, K, Q, S, |
| | 083SM-N373-R | SEQ ID NO: 86 | P, Q, R, S, T, V, W, Y | T, V |

TABLE 16

| Position | Oligo name | Primer Sequence | Identified substitutions | Active substitutions |
|---|---|---|---|---|
| W556 | 083SM-W556-F | SEQ ID NO: 87 | A, C, D, F, G, I, K, L, M, N, | F, T, Y |
| | 083SM-W556-R | SEQ ID NO: 88 | P, Q, R, S, T, V, Y | |
| R557 | 083SM-R557-F | SEQ ID NO: 89 | C, D, G, H, I, K, L, M, N, P, | C, D, G, H, I, K, L, M, N, P, |
| | 083SM-R557-R | SEQ ID NO: 90 | Q, S, T, V, W, Y | Q, S, T, V, W, Y |
| A558 | 083SM-A558-F | SEQ ID NO: 91 | C, D, F, G, H, I, K, L, N, P, | C, D, F, G, H, I, K, L, N, P, |
| | 083SM-A558-R | SEQ ID NO: 92 | Q, R, S, V, W, Y | Q, R, S, V, W, Y |
| K559 | 083SM-K559-F | SEQ ID NO: 93 | A, C, F, G, H, I, L, N, P, Q, | A, C, F, G, H, I, L, N, Q, R, |
| | 083SM-K559-R | SEQ ID NO: 94 | R, S, T, V, Y | S, T, V, Y |
| C560 | 083SM-C560-F | SEQ ID NO: 95 | A, D, F, G, H, I, K, L, M, N, | A, F, G, I, M, N, R, S, T, V |
| | 083SM-C560-R | SEQ ID NO: 96 | P, Q, R, S, T, V, Y | |
| K561 | 083SM-K561-F | SEQ ID NO: 97 | A, C, D, E, F, G, H, I, L, M, | A, C, D, E, F, G, H, I, L, M, |
| | 083SM-K561-R | SEQ ID NO: 98 | N, P, R, S, T, V, Y | N, R, S, T, V, Y |
| N562 | 083SM-N562-F | SEQ ID NO: 99 | A, C, D, E, F, G, H, K, L, M, | C, D, E, G, H, L, M, R, S, T, |
| | 083SM-N562-R | SEQ ID NO: 100 | P, R, S, T, V, W, Y | V, Y |
| V563 | 083SM-V563-F | SEQ ID NO: 101 | A, C, D, F, G, H, I, K, L, M, | A, C, D, F, H, I, L, M, N, Q, |
| | 083SM-V563-R | SEQ ID NO: 102 | N, P, Q, R, S, T, W | T, W |
| A564 | 083SM-A564-F | SEQ ID NO: 103 | C, D, F, G, H, I, K, L, M, N, | C, G, M, Q, S, T, V, W, Y |
| | 083SM-A564-R | SEQ ID NO: 104 | P, Q, R, S, T, V, W, Y | |

TABLE 17

| Position | Oligo name | Oligo Sequence | Identified substitutions | Active substitutions |
|---|---|---|---|---|
| L646 | 083SM-L646-F | SEQ ID NO: 105 | A, C, D, E, F, G, H, I, K, M, | A, C, G, I, M, N, Q, S, T, V |
| | 083SM-L646-R | SEQ ID NO: 106 | N, P, Q, R, S, T, V, W, Y | |
| L647 | 083SM-L647-F | SEQ ID NO: 107 | A, D, F, G, H, I, K, M, N, P, | D, G, M, N, Q, T |
| | 083SM-L647-R | SEQ ID NO: 108 | Q, R, S, T, V, W, Y | |
| M648 | 083SM-M648-F | SEQ ID NO: 109 | A, C, D, E, F, G, H, K, L, N, | A, C, D, E, F, G, H, K, L, N, |
| | 083SM-M648-R | SEQ ID NO: 110 | P, Q, R, S, T, V, W, Y | P, Q, R, S, T, V, W, Y |
| P649 | 083SM-P649-F | SEQ ID NO: 111 | A, C, D, E, F, G, H, I, K, L, | A, C, D, E, F, G, H, K, M, N, |
| | 083SM-P649-R | SEQ ID NO: 112 | M, N, Q, R, S, T, V, W, Y | Q, R, S, T, W, Y |
| T650 | 083SM-T650-F | SEQ ID NO: 113 | A, C, D, F, G, H, I, K, L, M, | A, C, D, F, G, H, I, K, L, M, |
| | 083SM-T650-R | SEQ ID NO: 114 | P, Q, R, S, V, Y | P, Q, R, S, V, Y |
| E651 | 083SM-E651-F | SEQ ID NO: 115 | A, C, D, G, H, I, K, L, M, N, | A, C, D, G, H, I, L, M, N, P, |
| | 083SM-E651-R | SEQ ID NO: 116 | P, Q, R, S, T, V, W, Y | Q, R, S, T, V, Y |
| L652 | 083SM-L652-F | SEQ ID NO: 117 | A, C, D, E, F, G, H, I, K, M, | C, F, I, K, M, P, R, S, T, V |
| | 083SM-L652-R | SEQ ID NO: 118 | N, P, Q, R, S, T, V, Y | |
| T653 | 083SM-T653-F | SEQ ID NO: 119 | C, D, E, F, G, H, I, K, L, P, | C, D, E, F, G, H, I, K, L, P, |
| | 083SM-T653-R | SEQ ID NO: 120 | R, S, V, W | R, S, V, W |
| T654 | 083SM-T654-F | SEQ ID NO: 121 | A, C, F, H, I, K, L, M, N, P, | A, C, F, I, K, L, M, P, R, S, |
| | 083SM-T654-R | SEQ ID NO: 122 | Q, R, S, V, W, Y | V, W, Y |
| W655 | 083SM-W655-F | SEQ ID NO: 123 | A, C, E, F, G, L, N, Q, R, S, | F, Y |
| | 083SM-W655-R | SEQ ID NO: 124 | T, V, Y | |

TABLE 18

| Position | Oligo name | Primer Sequence | Identified substitutions | Active substitutions |
|---|---|---|---|---|
| R771 | 083SM-R771-F | SEQ ID NO: 125 | A, C, D, E, F, G, H, I, K, L, | A, D, E, F, G, H, I, K, L, |
| | 083SM-R771-R | SEQ ID NO: 126 | H, P, S, T, V, W, Y | N, S, T, V, W, Y |
| R772 | 083SM-R772-F | SEQ ID NO: 127 | A, C, D, E, F, G, H, I, K, L, | A, C, D, E, F, G, H, I, K, |
| | 083SM-R772-R | SEQ ID NO: 128 | M, P, Q, S, T, V, W, Y | L, M, P, Q, S, T, V, W, Y |
| D773 | 083SM-D773-F | SEQ ID NO: 129 | A, C, E, F, G, H, I, K, L, M, | A, E, F, G, H, I, K, L, M, |
| | 083SM-D773-R | SEQ ID NO: 130 | N, P, Q, R, S, T, V, W, Y | N, Q, R, S, T, V, W, Y |
| Q774 | 083SM-Q774-F | SEQ ID NO: 131 | A, D, G, H, I, K, L, M, N, P, | A, D, G, H, I, K, L, M, N, |
| | 083SM-Q774-R | SEQ ID NO: 132 | R, S, T, V, W, Y | P, R, S, T, V, W, Y |
| V775 | 083SM-V775-F | SEQ ID NO: 133 | A, C, D, E, G, H, I, L, M, N, | A, C, D, E, G, H, I, N, P, |
| | 083SM-V775-R | SEQ ID NO: 134 | P, Q, R, S, T, Y | Q, R, S, T, Y |
| L776 | 083SM-L776-F | SEQ ID NO: 135 | A, C, D, E, F, G, H, I, K, N, | A, C, D, E, F, G, H, I, K, |
| | 083SM-L776-R | SEQ ID NO: 136 | P, Q, R, S, T, V, W, Y | N, P, Q, R, S, T, V, Y |
| P777 | 083SM-P777-F | SEQ ID NO: 137 | A, C, D, E, F, G, H, K, L, M, | A, C, D, E, F, G, H, K, L, |
| | 083SM-P777-R | SEQ ID NO: 138 | N, Q, R, S, T, V, W, Y | M, N, Q, S, T, V, W, Y |
| F778 | 083SM-F778-F | SEQ ID NO: 139 | A, D, G, H, I, K, L, M, N, P, | A, H, I, L, M, N, Q, S, V, |
| | 083SM-F778-R | SEQ ID NO: 140 | Q, R, S, T, V, W, Y | W, Y |
| Q779 | 083SM-Q779-F | SEQ ID NO: 141 | A, C, D, E, F, G, H, I, K, L, | A, C, D, E, G, H, K, L, N, |
| | 083SM-Q779-R | SEQ ID NO: 142 | N, P, R, S, T, V, W | P, R, S, T, V |
| A780 | 083SM-A780-F | SEQ ID NO: 143 | C, D, E, F, G, H, K, L, N, P, | C, N, P, Q, S |
| | 083SM-A780-R | SEQ ID NO: 144 | Q, R, S, T, V, W, Y | |
| A781 | 083SM-A781-F | SEQ ID NO: 145 | C, D, E, F, G, H, I, L, M, N, | C, D, E, F, G, H, I, N, Q, |
| | 083SM-A781-R | SEQ ID NO: 146 | P, Q, R, S, T, V, W, Y | R, S, T, V, W, Y |
| A782 | 083SM-A782-F | SEQ ID NO: 147 | C, D, E, F, G, H, I, K, L, M, | C, D, E, F, G, H, I, K, M, |
| | 083SM-A782-R | SEQ ID NO: 148 | N, P, Q, R, S, T, V, W, Y | P, Q, R, S, T, V, W, Y |
| P783 | 083SM-P783-F | SEQ ID NO: 149 | A, C, D, E, F, G, H, I, L, M, | A, C, D, E, G, H, N, Q, R, |
| | 083SM-P783-R | SEQ ID NO: 150 | N, Q, R, S, T, V, Y | S, T, V |
| L784 | 083SM-L784-F | SEQ ID NO: 151 | A, C, D, E, F, G, H, I, K, M, | A, S, F, H, I, K, M, N, P, |
| | 083SM-L784-R | SEQ ID NO: 152 | N, P, Q, R, S, T, V, W, Y | Q, S, T, V, W |
| N785 | 083SM-N785-F | SEQ ID NO: 153 | A, C, E, F, G, H, I, K, L, M, | A, C, E, F, G, H, I, K, L, |
| | 083SM-N785-R | SEQ ID NO: 154 | P, Q, R, S, T, V, W, Y | M, Q, R, S, T, V, W, Y |
| Y786 | 083SM-Y786-F | SEQ ID NO: 155 | C, D, E, F, G, H, I, K, L, M, | F, I, L, W |
| | 083SM-Y786-R | SEQ ID NO: 156 | N, P, Q, R, S, T, V, W | |

### Example 12

### PtIP-83Aa Variants with Multiple Amino Acid Substitutions in Motif A or Motif C

[0519] PtIP-83Aa variants with multiple amino acid substitutions within a motif were constructed for Motif A and Motif C using either the QuikChange® Lightning Site-Directed Mutagenesis Kit (Agilent) (as described in Example 11), or by multi-PCR fragment overlap assembly (Gibson Assembly Cloning Kit, New England Biolabs Inc.) into a plant transient vector containing the viral DMMV promoter. Primers used in constructing combinations of mutations within an individual motif are summarized in Table 19. The resulting combinatory libraries were transformed into Agrobacterium for plant transient expression and subsequent SBL activity assays as described in Example 4. Active variants, defined as having an average activity score of <=60% of leaf disk eaten, were sent for sequence identification.

TABLE 19

| Library | Primer | Sequence |
|---|---|---|
| Motif A | 83M1- | CTCGAGGGAGCCGAGAAAGTGADGCRSYT |
| Combi-1 | CombiF1 | CTATRTCTTKDSCGACRTCVTCGWGVTCC |
| | | CAGTCGTGGAATGGCGGTGG |
| | | SEQ ID NO: 157 |
| — | 83M1- | CTCGAGGGAGCCGAGAAAGTGADGCRSYT |
| | CombiF2 | CVTCRTCTTKDSCGACRTCVTCGWGVTCC |
| | | CAGTCGTGGAATGGCGGTGG |
| | | SEQ ID NO: 158 |
| — | 83M1- | CCACCGCCATTCCACGACTGGGABCWCGA |
| | CombiRC1 | BGAYGTCGSHMAAGAYATAGARSYGCHTC |
| | | ACTTTCTCGGCTCCCTCGAG |
| | | SEQ ID NO: 159 |
| — | 83M1- | CCACCGCCATTCCACGACTGGGABCWCGA |
| | CombiRC2 | BGAYGTCGSHMAAGAYGABGARSYGCHTC |
| | | ACTTTCTCGGCTCCCTCGAG |
| | | SEQ ID NO: 160 |
| Motif A | 83M1Cmb2-R | CGGCCACCGCCATTCCACGACTGGTAGCW |
| Combi-2 | | CGABAAYGTCGSHAAAAAYATACAASYGC |
| | | HTCACTTTCTCGGCTCCCTCGAGCTG |
| | | SEQ ID NO: 161 |
| — | GZ550- | AATCTCTCATCTAAGAGGCTGGATCCTAG |
| | 83Aa-F | GATGGCTCTCGTGGATTACGGC |
| | | SEQ ID NO: 162 |
| — | GZ550- | TGGCCAATCCAGAAGATGGACAAGTCTAG |
| | 83Aa-R | ACTACTCTTCGTCGTGCCGCCAG |
| | | SEQ ID NO: 163 |
| — | 83M1Cmb2- | CTACCAGTCGTGGAATGGCGGTGGCCG |
| | 3p-F | SEQ ID NO: 164 |
| Motif C | PtIP-83- | GTCTCGGAGGTTCCGGTGTGGABSGBCMR |
| Combi | MotifC- | GTGCAASWSCGTGGCTGCACTGGGTCGGG |
| | Combi-F1 | AGATG |
| | | SEQ ID NO: 165 |
| — | PtIP-83- | GTCTCGGAGGTTCCGGTGTGGCWSGBCMR |
| | MotifC- | GTGCAASWSCGTGGCTGCACTGGGTCGGG |
| | Combi-F2 | AGATG |
| | | SEQ ID NO: 166 |
| — | PtIP-83- | GTCTCGGAGGTTCCGGTGTGGABSGBCMR |
| | MotifC- | GTGCAASMATGTGGCTGCACTGGGTCGGG |
| | Combi-F3 | AGATG |
| | | SEQ ID NO: 167 |
| — | PtIP-83- | GTCTCGGAGGTTCCGGTGTGGCWSGBCMR |
| | MotifC- | GTGCAASMATGTGGCTGCACTGGGTCGGG |
| | Combi-F4 | AGATG |
| | | SEQ ID NO: 168 |
| — | GZ550- | AATCTCTCATCTAAGAGGCTGGATCCTAG |
| | 83Aa-F | GATGGCTCTCGTGGATTACGGC |
| | | SEQ ID NO: 162 |
| — | GZ550- | TGGCCAATCCAGAAGATGGACAAGTCTAG |
| | 83Aa-R | ACTACTCTTCGTCGTGCCGCCAG |
| | | SEQ ID NO: 163 |
| — | PtIP-83- | CACCGGAACCTCCGAGACTTCCGTT |
| | MotifC- | SEQ ID NO: 171 |
| | Gibson-R | |

[0520] Two libraries with differing mutation rates were screened for Motif A. Motif A Combi-1 contains potential mutations at positions K54, R55, L56, Y57, V58, F59, A60, V62, V63, E64, and L65 in PtIP-83Aa (SEQ ID NO: 1): Motif A Combi-2 contains potential mutations at positions K54, R55, V58, A60, V62, V63, and E64 in PtIP-83Aa (SEQ ID NO: 1): From Motif A Combi -1, sequences were recovered for 5 active unique variants (96 total screened). From Motif A Combi -2, sequences were recovered for 59 active unique variants (192 total screened). Table 20 summarizes the amino acid substitutions of the resulting active PtIP-83Aa Motif A variants as compared to PtIP-83Aa.

TABLE 20

| | | Motif A amino acid | Additional | Total # |
|---|---|---|---|---|
| Variants | DNA sequence | sequence | mutations | Mut. |
| PtIP-83Aa | SEQ ID NO: 2 | VKRLYVFADVVELP (a.a. 53- | | 0 |
| SEQ ID NO: 1 | | 66 of SEQ ID NO: 1) | | |
| PtIP-83cmbM1-1 | SEQ ID NO: 172 | VKHLYIFCDVIELP (a.a. 53- | | 4 |
| SEQ ID NO: 236 | | 66 of SEQ ID NO: 236) | | |
| PtIP-83cmbM1-2 | SEQ ID NO: 173 | VKHLYIFCDVVELP (a.a. 53- | | 3 |
| SEQ ID NO: 237 | | 66 of SEQ ID NO: 237) | | |
| PtIP-83cmbM1-3 | SEQ ID NO: 174 | VKHLYIFSDIIELP (a.a. 53- | | 5 |
| SEQ ID NO: 238 | | 66 of SEQ ID NO: 238) | | |
| PtIP-83cmbM1-4 | SEQ ID NO: 175 | VKHLYIFTDVLELP (a.a. 53- | | 4 |
| SEQ ID NO: 239 | | 66 of SEQ ID NO: 239) | | |
| PtIP-83cmbM1-5 | SEQ ID NO: 176 | VKHLYVFADIIVLP (a.a. 53- | | 4 |
| SEQ ID NO: 240 | | 66 of SEQ ID NO: 240) | | |
| PtIP-83cmbM1-6 | SEQ ID NO: 177 | VKHLYVFADVIELP (a.a. 53- | | 2 |
| SEQ ID NO: 241 | | 66 of SEQ ID NO: 241) | | |
| PtIP-83cmbM1-7 | SEQ ID NO: 178 | VKHLYVFGDVIELP (a.a. 53- | | 3 |
| SEQ ID NO: 242 | | 66 of SEQ ID NO: 242) | | |
| PtIP-83cmbM1-8 | SEQ ID NO: 179 | VKHLYVFSDVIELP (a.a. 53- | | 3 |
| SEQ ID NO: 243 | | 66 of SEQ ID NO: 243) | | |
| PtIP-83cmbM1-9 | SEQ ID NO: 180 | VKHLYVFSDVLVLP (a.a. 53- | | 4 |
| SEQ ID NO: 244 | | 66 of SEQ ID NO: 244) | | |
| PtIP-83cmbM1-10 | SEQ ID NO: 181 | VKQLIIFSDIIELP (a.a. 53- | | 6 |
| SEQ ID NO: 245 | | 66 of SEQ ID NO: 245) | | |
| PtIP-83cmbM1-11 | SEQ ID NO: 182 | VKQLYIFCDIIELP (a.a. 53- | | 5 |
| SEQ ID NO: 246 | | 66 of SEQ ID NO: 246) | | |
| PtIP-83cmbM1-12 | SEQ ID NO: 183 | VKQLYIFCDVLELP (a.a. 53- | | 4 |
| SEQ ID NO: 247 | | 66 of SEQ ID NO: 247) | | |
| PtIP-83cmbM1-13 | SEQ ID NO: 184 | VKQLYIFGDVIELP (a.a. 53- | | 4 |
| SEQ ID NO: 248 | | 66 of SEQ ID NO: 248) | | |
| PtIP-83cmbM1-14 | SEQ ID NO: 185 | VKQLYIFSDIIELP (a.a. 53- | V24I | 6 |
| SEQ ID NO: 249 | | 66 of SEQ ID NO: 249) | | |
| PtIP-83cmbM1-15 | SEQ ID NO: 186 | VKQLYVFCDILELP (a.a. 53- | | 4 |
| SEQ ID NO: 250 | | 66 of SEQ ID NO: 250) | | |
| PtIP-83cmbM1-16 | SEQ ID NO: 187 | VKQLYVFSDILELP (a.a. 53- | | 4 |
| SEQ ID NO: 251 | | 66 of SEQ ID NO: 251) | | |
| PtIP-83cmbM1-17 | SEQ ID NO: 188 | VKQLYVFSDVLVLP (a.a. 53- | | 4 |
| SEQ ID NO: 252 | | 66 of SEQ ID NO: 252) | | |
| PtIP-83cmbM1-18 | SEQ ID NO: 189 | VKRFYIFADIVELP (a.a. 53- | | 3 |
| SEQ ID NO: 253 | | 66 of SEQ ID NO: 253-) | | |
| PtIP-83cmbM1-19 | SEQ ID NO: 190 | VKRFYIFSDIIELP (a.a. 53- | | 5 |
| SEQ ID NO: 254 | | 66 of SEQ ID NO: 254) | | |
| PtIP-83cmbM1-20 | SEQ ID NO: 191 | VKRFYVFSDIVELP (a.a. 53- | | 3 |
| SEQ ID NO: 255 | | 66 of SEQ ID NO: 255) | | |
| PtIP-83cmbM1-21 | SEQ ID NO: 192 | VKRLVILGDIIVVP (a.a. 53- | | 8 |
| SEQ ID NO: 256 | | 66 of SEQ ID NO: 256) | | |
| PtIP-83cmbM1-22 | SEQ ID NO: 193 | VKRLYIFADIIELP (a.a. 53- | | 3 |
| SEQ ID NO: 257 | | 66 of SEQ ID NO: 257) | | |
| PtIP-83cmbM1-23 | SEQ ID NO: 194 | VKRLYIFCDIIVLP (a.a. 53- | | 5 |
| SEQ ID NO: 258 | | 66 of SEQ ID NO: 258) | | |
| PtIP-83cmbM1-24 | SEQ ID NO: 195 | VKRLYIFCDIVELP (a.a. 53- | | 3 |
| SEQ ID NO: 259 | | 66 of SEQ ID NO: 259) | | |
| PtIP-83cmbM1-25 | SEQ ID NO: 196 | VKRLYIFGDIIELP (a.a. 53- | P74A | 5 |
| SEQ ID NO: 260 | | 66 of SEQ ID NO: 260) | | |
| PtIP-83cmbM1-26 | SEQ ID NO: 197 | VKRLYIFGDVIELP (a.a. 53- | | 3 |
| SEQ ID NO: 261 | | 66 of SEQ ID NO: 261) | | |
| PtIP-83cmbM1-27 | SEQ ID NO: 198 | VKRLYIFSDIIVLP (a.a. 53- | | 5 |
| SEQ ID NO: 262 | | 66 of SEQ ID NO: 262) | | |
| PtIP-83cmbM1-28 | SEQ ID NO: 199 | VKRLYIFSDILELP (a.a. 53- | | 4 |
| SEQ ID NO: 263 | | 66 of SEQ ID NO: 263) | | |
| PtIP-83cmbM1-29 | SEQ ID NO: 200 | VKRLYIFSDVIVLP (a.a. 53- | | 4 |
| SEQ ID NO: 264 | | 66 of SEQ ID NO: 264) | | |
| PtIP-83cmbM1-30 | SEQ ID NO: 201 | VKRLYIFTDVIELP (a.a. 53- | | 3 |
| SEQ ID NO: 265 | | 66 of SEQ ID NO: 265) | | |
| PtIP-83cmbM1-31 | SEQ ID NO: 202 | VKRLYVFCDIIELP (a.a. 53- | | 3 |
| SEQ ID NO: 266 | | 66 of SEQ ID NO: 266) | | |
| PtIP-83cmbM1-32 | SEQ ID NO: 203 | VKRLYVFCDIIVLP (a.a. 53- | | 4 |
| SEQ ID NO: 267 | | 66 of SEQ ID NO: 267) | | |
| PtIP-83cmbM1-33 | SEQ ID NO: 204 | VKRLYVFGDIVELP (a.a. 53- | | 2 |
| SEQ ID NO: 268 | | 66 of SEQ ID NO: 268) | | |
| PtIP-83cmbM1-34 | SEQ ID NO: 205 | VKRLYVFGDVVELP (a.a. 53- | | 1 |
| SEQ ID NO: 269 | | 66 of SEQ ID NO: 269) | | |
| PtIP-83cmbM1-35 | SEQ ID NO: 206 | VKRLYVFSDIIELP (a.a. 53- | | 3 |
| SEQ ID NO: 270 | | 66 of SEQ ID NO: 270) | | |
| PtIP-83cmbM1-36 | SEQ ID NO: 207 | VKRLYVFSDIVELP (a.a. 53- | | 2 |
| SEQ ID NO: 271 | | 66 of SEQ ID NO: 271) | | |
| PtIP-83cmbM1-37 | SEQ ID NO: 208 | VKRLYVFSDVIELP (a.a. 53- | | 2 |
| SEQ ID NO: 272 | | 66 of SEQ ID NO: 272) | | |
| PtIP-83cmbM1-38 | SEQ ID NO: 209 | VKRLYVFTDVIVLP (a.a. 53- | | 3 |
| SEQ ID NO: 273 | | 66 of SEQ ID NO: 273) | | |
| PtIP-83cmbM1-39 | SEQ ID NO: 210 | VKRLYVFTDVVVLP (a.a. 53- | | 2 |
| SEQ ID NO: 274 | | 66 of SEQ ID NO: 274) | | |
| PtIP-83cmbM1-40 | SEQ ID NO: 211 | VMHLYIFADVIELP (a.a. 53- | | 4 |
| SEQ ID NO: 275 | | 66 of SEQ ID NO: 275) | | |
| PtIP-83cmbM1-41 | SEQ ID NO: 212 | VMQLYIFCDILELP (a.a. 53- | P74T | 7 |
| SEQ ID NO: 276 | | 66 of SEQ ID NO: 276) | | |
| PtIP-83cmbM1-42 | SEQ ID NO: 213 | VMRLYIFADVVVLP (a.a. 53- | | 3 |
| SEQ ID NO: 277 | | 66 of SEQ ID NO: 277) | | |
| PtIP-83cmbM1-43 | SEQ ID NO: 214 | VMRLYIFCDVIELP (a.a. 53- | | 4 |
| SEQ ID NO: 278 | | 66 of SEQ ID NO: 278) | | |
| PtIP-83cmbM1-44 | SEQ ID NO: 215 | VMRLYVFCDIIELP (a.a. 53- | | 4 |
| SEQ ID NO: 279 | | 66 of SEQ ID NO: 279) | | |
| PtIP-83cmbM1-45 | SEQ ID NO: 216 | VMRLYVFCDILVLP (a.a. 53- | | 5 |
| SEQ ID NO: 280 | | 66 of SEQ ID NO: 280) | | |
| PtIP-83cmbM1-46 | SEQ ID NO: 217 | VMRLYVFSDIIVLP (a.a. 53- | | 5 |
| SEQ ID NO: 281 | | 66 of SEQ ID NO: 281) | | |
| PtIP-83cmbM1-47 | SEQ ID NO: 218 | VRHLYIFADIIELP (a.a. 53- | | 5 |
| SEQ ID NO: 282 | | 66 of SEQ ID NO: 282) | | |
| PtIP-83cmbM1-48 | SEQ ID NO: 219 | VRHLYIFADVVELP (a.a. 53- | | 3 |
| SEQ ID NO: 283 | | 66 of SEQ ID NO: 283) | | |
| PtIP-83cmbM1-49 | SEQ ID NO: 220 | VRHLYIFCDVIELP (a.a. 53- | | 5 |
| SEQ ID NO: 284 | | 66 of SEQ ID NO: 284) | | |
| PtIP-83cmbM1-50 | SEQ ID NO: 221 | VRHLYIFSDVIELP (a.a. 53- | | 5 |
| SEQ ID NO: 285 | | 66 of SEQ ID NO: 285) | | |
| PtIP-83cmbM1-51 | SEQ ID NO: 222 | VRHLYIFSDVVELP (a.a. 53- | | 4 |
| SEQ ID NO: 286 | | 66 of SEQ ID NO: 286) | | |
| PtIP-83cmbM1-52 | SEQ ID NO: 223 | VRHLYVFTDVLELP (a.a. 53- | | 4 |
| SEQ ID NO: 287 | | 66 of SEQ ID NO: 287) | | |
| PtIP-83cmbM1-53 | SEQ ID NO: 224 | VRQLYIFCDVIVLP (a.a. 53- | | 6 |
| SEQ ID NO: 288 | | 66 of SEQ ID NO: 288) | | |
| PtIP-83cmbM1-54 | SEQ ID NO: 225 | VRQLYIFSDVVVLP (a.a. 53- | | 5 |
| SEQ ID NO: 289 | | 66 of SEQ ID NO: 289) | | |
| PtIP-83cmbM1-55 | SEQ ID NO: 226 | VRQLYVFCDVLVLP (a.a. 53- | | 5 |
| SEQ ID NO: 290 | | 66 of SEQ ID NO: 290) | | |
| PtIP-83cmbM1-56 | SEQ ID NO: 227 | VRRLYIFADILELP (a.a. 53- | | 4 |
| SEQ ID NO: 291 | | 66 of SEQ ID NO: 291) | | |
| PtIP-83cmbM1-57 | SEQ ID NO: 228 | VRRLYIFADIVELP (a.a. 53- | P74A | 4 |
| SEQ ID NO: 292 | | 66 of SEQ ID NO: 292) | | |
| PtIP-83cmbM1-58 | SEQ ID NO: 229 | VRRLYIFGDIVELP (a.a. 53- | | 4 |
| SEQ ID NO: 293 | | 66 of SEQ ID NO: 293) | | |
| PtIP-83cmbM1-59 | SEQ ID NO: 230 | VRRLYIFTDIIELP (a.a. 53- | | 5 |
| SEQ ID NO: 294 | | 66 of SEQ ID NO: 294) | | |
| PtIP-83cmbM1-60 | SEQ ID NO: 231 | VRRLYVFADIIDLP (a.a. 53- | | 4 |
| SEQ ID NO: 295 | | 66 of SEQ ID NO: 295) | | |
| PtIP-83cmbM1-61 | SEQ ID NO: 232 | VRRLYVFADIVVLP (a.a. 53- | | 3 |
| SEQ ID NO: 296 | | 66 of SEQ ID NO: 296) | | |
| PtIP-83cmbM1-62 | SEQ ID NO: 233 | VRRLYVFCDVVVLP (a.a. 53- | | 3 |
| SEQ ID NO: 297 | | 66 of SEQ ID NO: 297) | | |
| PtIP-83cmbM1-63 | SEQ ID NO: 234 | VRRLYVFTDIIELP (a.a. 53- | | 4 |
| SEQ ID NO: 298 | | 66 of SEQ ID NO: 298) | | |
| PtIP-83cmbM1-64 | SEQ ID NO: 235 | VRRLYVFTDVLVLP (a.a. 53- | | 4 |
| SEQ ID NO: 299 | | 66 of SEQ ID NO: 299) | | |

[0521] A single combination library of Motif C containing potential mutations at positions R557, A558, K559, K561, and N562 of PtIP-83Aa (SEQ ID NO: 1) was screened. From a total of 233 variants screened from Motif C Combi, 34 active unique sequence variants were identified. Table 21 summarizes the amino acid substitutions of the resulting active PtIP-83Aa Motif C variants as compared to PtIP-83Aa.

TABLE 21

| | | | Additional | Total |
|---|---|---|---|---|
| Variants | DNA sequence | AA sequence | mutations | Mutations |
| PtIP-83Aa | SEQ ID NO: 2 | WRAKCKNVA (a.a. 556- | | 0 |
| SEQ ID NO: 1 | | 564 of SEQ ID NO: 1) | | |
| PtIP-83cmbM3-1 | SEQ ID NO: 300 | WHARCKSVA (a.a. 556- | | 3 |
| SEQ ID NO: 334 | | 564 of SEQ ID NO: 334) | | |
| PtIP-83cmbM3-2 | SEQ ID NO: 301 | WHGKCKNVA (a.a. 556- | | 2 |
| SEQ ID NO: 335 | | 564 of SEQ ID NO: 335) | | |
| PtIP-83cmbM3-3 | SEQ ID NO: 302 | WIAKCKCVA (a.a. 556- | | 2 |
| SEQ ID NO: 336 | | 564 of SEQ ID NO: 336) | | |
| PtIP-83cmbM3-4 | SEQ ID NO: 303 | WIAKCKSVA (a.a. 556- | | 2 |
| SEQ ID NO: 337 | | 564 of SEQ ID NO: 337) | | |
| PtIP-83cmbM3-5 | SEQ ID NO: 304 | WIGKCKNVA (a.a. 556- | | 2 |
| SEQ ID NO: 338 | | 564 of SEQ ID NO: 338) | | |
| PtIP-83cmbM3-6 | SEQ ID NO: 305 | WIGKCKSVA (a.a. 556- | | 3 |
| SEQ ID NO: 339 | | 564 of SEQ ID NO: 339) | | |
| PtIP-83cmbM3-7 | SEQ ID NO: 306 | WIGKCNNVA (a.a. 556- | | 3 |
| SEQ ID NO: 340 | | 564 of SEQ ID NO: 340) | | |
| PtIP-83cmbM3-8 | SEQ ID NO: 307 | WIVKCKSVA (a.a. 556- | | 3 |
| SEQ ID NO: 341 | | 564 of SEQ ID NO: 341) | | |
| PtIP-83cmbM3-9 | SEQ ID NO: 308 | WLARCKNVA (a.a. 556- | | 2 |
| SEQ ID NO: 342 | | 564 of SEQ ID NO: 342) | | |
| PtIP-83cmbM3-10 | SEQ ID NO: 309 | WLARCKSVA (a.a. 556- | | 3 |
| SEQ ID NO: 343 | | 564 of SEQ ID NO: 343) | | |
| PtIP-83cmbM3-11 | SEQ ID NO: 310 | WLGRCKNVA (a.a. 556- | | 3 |
| SEQ ID NO: 344 | | 564 of SEQ ID NO: 344) | | |
| PtIP-83cmbM3-12 | SEQ ID NO: 311 | WLGRCKSVA (a.a. 556- | | 4 |
| SEQ ID NO: 345 | | 564 of SEQ ID NO: 345) | | |
| PtIP-83cmbM3-13 | SEQ ID NO: 312 | WLVKCKCVA (a.a. 556- | | 3 |
| SEQ ID NO: 346 | | 564 of SEQ ID NO: 346) | | |
| PtIP-83cmbM3-14 | SEQ ID NO: 313 | WMAKCKNVA (a.a. 556- | A502S | 2 |
| SEQ ID NO: 347 | | 564 of SEQ ID NO: 347) | | |
| PtIP-83cmbM3-15 | SEQ ID NO: 314 | WMGRCKSVA (a.a. 556- | | 4 |
| SEQ ID NO: 348 | | 564 of SEQ ID NO: 348) | | |
| PtIP-83cmbM3-16 | SEQ ID NO: 315 | WMVKCKNVA (a.a. 556- | | 2 |
| SEQ ID NO: 349 | | 564 of SEQ ID NO: 349) | | |
| PtIP-83cmbM3-17 | SEQ ID NO: 316 | WMVKCKSVA (a.a. 556- | | 3 |
| SEQ ID NO: 350 | | 564 of SEQ ID NO: 350) | | |
| PtIP-83cmbM3-18 | SEQ ID NO: 317 | WMVRCKNVA (a.a. 556- | | 3 |
| SEQ ID NO: 351 | | 564 of SEQ ID NO: 351) | | |
| PtIP-83cmbM3-19 | SEQ ID NO: 318 | WQARCKHVA (a.a. 556- | | 3 |
| SEQ ID NO: 352 | | 564 of SEQ ID NO: 352) | | |
| PtIP-83cmbM3-20 | SEQ ID NO: 319 | WQARCKNVA (a.a. 556- | K505N | 3 |
| SEQ ID NO: 353 | | 564 of SEQ ID NO: 353) | | |
| PtIP-83cmbM3-21 | SEQ ID NO: 320 | WQGRCKNVA (a.a. 556- | | 3 |
| SEQ ID NO: 354 | | 564 of SEQ ID NO: 354) | | |
| PtIP-83cmbM3-22 | SEQ ID NO: 321 | WQVRCKSVA (a.a. 556- | | 4 |
| SEQ ID NO: 355 | | 564 of SEQ ID NO: 355) | | |
| PtIP-83cmbM3-23 | SEQ ID NO: 322 | WRARCKNVA (a.a. 556- | T573A | 2 |
| SEQ ID NO: 356 | | 564 of SEQ ID NO: 356) | | |
| PtIP-83cmbM3-24 | SEQ ID NO: 323 | WRGKCKSVA (a.a. 556- | | 2 |
| SEQ ID NO: 357 | | 564 of SEQ ID NO: 357) | | |
| PtIP-83cmbM3-25 | SEQ ID NO: 324 | WRGRCKTVA (a.a. 556- | | 3 |
| SEQ ID NO: 358 | | 564 of SEQ ID NO: 358) | | |
| PtIP-83cmbM3-26 | SEQ ID NO: 325 | WSARCKSVA (a.a. 556- | | 3 |
| SEQ ID NO: 359 | | 564 of SEQ ID NO: 359) | | |
| PtIP-83cmbM3-27 | SEQ ID NO: 326 | WSVKCKHVA (a.a. 556- | | 3 |
| SEQ ID NO: 360 | | 564 of SEQ ID NO: 360) | | |
| PtIP-83cmbM3-28 | SEQ ID NO: 327 | WTGRCKTVA (a.a. 556- | | 4 |
| SEQ ID NO: 361 | | 564 of SEQ ID NO: 361) | | |
| PtIP-83cmbM3-29 | SEQ ID NO: 328 | WTGRCNHVA (a.a. 556- | R568Q | 6 |
| SEQ ID NO: 362 | | 564 of SEQ ID NO: 362) | | |
| PtIP-83cmbM3-30 | SEQ ID NO: 329 | WTVKCKNVA (a.a. 556- | | 2 |
| SEQ ID NO: 363 | | 564 of SEQ ID NO: 363) | | |
| PtIP-83cmbM3-31 | SEQ ID NO: 330 | WTVKCKSVA (a.a. 556- | | 3 |
| SEQ ID NO: 364 | | 564 of SEQ ID NO: 364) | | |
| PtIP-83cmbM3-32 | SEQ ID NO: 331 | WTVRCKNVA (a.a. 556- | | 3 |
| SEQ ID NO: 365 | | 564 of SEQ ID NO: 365) | | |
| PtIP-83cmbM3-33 | SEQ ID NO: 332 | WRARCKHVA (a.a. 556- | | 2 |
| SEQ ID NO: 366 | | 564 of SEQ ID NO: 366) | | |
| PtIP-83cmbM3-34 | SEQ ID NO: 333 | WIGRCKSVA (a.a. 556- | | 4 |
| SEQ ID NO: 367 | | 564 of SEQ ID NO: 367) | | |

### Example 13

### PtIP-83Aa Variants with Multiple Amino Acid Substitutions in Motif A and Motif C

[0522] Additional sequence diversity was created by combining active Motif A combinations with active Motif C combinations. Twenty four unique active Motif A combination variants and 11 unique active Motif C combination variants were selected for construction of a Motif A x Motif C Library (Table 22).

TABLE 22
Sequence variants used for construction
of Motif A × Motif C Combination Library

Motif A
PtIP-83cmbM1-1
SEQ ID NO: 236
PtIP-83cmbM1-2
SEQ ID NO: 237
PtIP-83cmbM1-4
SEQ ID NO: 239
PtIP-83cmbM1-6
SEQ ID NO: 241
PtIP-83cmbM1-12
SEQ ID NO: 247
PtIP-83cmbM1-15
SEQ ID NO: 250
PtIP-83cmbM1-16
SEQ ID NO: 251
PtIP-83cmbM1-18
SEQ ID NO: 253
PtIP-83cmbM1-21
SEQ ID NO: 256
PtIP-83cmbM1-22
SEQ ID NO: 257
PtIP-83cmbM1-30
SEQ ID NO: 265
PtIP-83cmbM1-31
SEQ ID NO: 266
PtIP-83cmbM1-32
SEQ ID NO: 267
PtIP-83cmbM1-35
SEQ ID NO: 270
PtIP-83cmbM1-36
SEQ ID NO: 271
PtIP-83cmbM1-37
SEQ ID NO: 272
PtIP-83cmbM1-44
SEQ ID NO: 279
PtIP-83cmbM1-49
SEQ ID NO: 284
PtIP-83cmbM1-51
SEQ ID NO: 286
PtIP-83cmbM1-55
SEQ ID NO: 290
PtIP-83cmbM1-56
SEQ ID NO: 291
PtIP-83cmbM1-60
SEQ ID NO: 295
PtIP-83cmbM1-62
SEQ ID NO: 297
PtIP-83cmbM1-64
SEQ ID NO: 299
Motif C
PtIP-83cmbM3-2
SEQ ID NO: 335
PtIP-83cmbM3-5
SEQ ID NO: 338
PtIP-83cmbM3-9
SEQ ID NO: 342
PtIP-83cmbM3-11
SEQ ID NO: 344
PtIP-83cmbM3-16
SEQ ID NO: 349
PtIP-83cmbM3-19
SEQ ID NO: 352
PtIP-83cmbM3-20
SEQ ID NO: 353
PtIP-83cmbM3-23
SEQ ID NO: 356
PtIP-83cmbM3-24
SEQ ID NO: 357
PtIP-83cmbM3-25
SEQ ID NO: 358
PtIP-83cmbM3-30
SEQ ID NO: 363

[0523] Plasmid DNA was isolated from these variants and pooled by motif. Motif A combinations were PCR amplified from the Motif A pool using the following primers: AATCTCTCATCTAAGAGGCTGGATCCTAGGATGGCTCTCGTGGATTACGGC (SEQ ID NO: 630) and GCAGCCACAACCTCCATCACAGC (SEQ ID NO: 631). Motif C combinations were PCR amplified from the Motif C pool using the following primers: TGGCCAATCCAGAAGATGGACAAGTCTAGACTACTCTTCGTCGTGCCGCCAG (SEQ ID NO: 632) and GCTGTGATGGAGGTTGTGGCTGC (SEQ ID NO: 633). The two PCR products were then assembled by multi-PCR fragments overlap (Gibson Assembly Cloning Kit, New England Biolabs Inc) into a plant transient vector containing the viral DMMV promoter. 94 variants from this library were screened by plant transient expression and SBL activity assay as described in Example 4. 30 unique active variants, defined as having an average activity score of <=60% of leaf disk eaten, were identified by sequencing. Table 23 summarizes the amino acid substitutions of the resulting active PtIP-83Aa Motif A x Motif C variants as compared to PtIP-83Aa.

TABLE 23

| | | | Motif C | Add. | Total |
|---|---|---|---|---|---|
| Variant | DNA sequence | Motif A sequence | sequence | Mut. | Mut. |
| PtIP-83Aa | SEQ ID NO: 2 | VKRLYVFADVVELP | WRAKCKNVA | | 0 |
| SEQ ID NO: 1 | | (a.a. 53-66 of | (a.a. 556- | | |
| | | SEQ ID NO: 1) | 564 of SEQ ID | | |
| | | | NO: 1) | | |
| PtIP-83cmbM1xM3-1 | SEQ ID NO: 368 | VKHLYIFTDVLELP | WHGKCKNVA | S533F | 7 |
| SEQ ID NO: 398 | | (a.a. 53-66 of | (a.a. 556- | | |
| | | SEQ ID NO: 398) | 564 of SEQ ID | | |
| | | | NO: 398) | | |
| PtIP-83cmbM1xM3-2 | SEQ ID NO: 369 | VKHLYIFTDVLELP | WLARCKNVA | | 6 |
| SEQ ID NO: 399 | | (a.a. 53-66 of | (a.a. 556- | | |
| | | SEQ ID NO: 399) | 564 of SEQ ID | | |
| | | | NO: 399) | | |
| PtIP-83cmbM1xM3-3 | SEQ ID NO: 370 | VKHLYIFTDVLELP | WQARCKHVA | | 7 |
| SEQ ID NO: 400 | | (a.a. 53-66 of | (a.a. 556- | | |
| | | SEQ ID NO: 400) | 564 of SEQ ID | | |
| | | | NO: 400) | | |
| PtIP-83cmbM1xM3-4 | SEQ ID NO: 371 | VKHLYVFADVIELP | WQARCKHVA | | 5 |
| SEQ ID NO: 401 | | (a.a. 53-66 of | (a.a. 556- | | |
| | | SEQ ID NO: 401) | 564 of SEQ ID | | |
| | | | NO: 401) | | |
| PtIP-83cmbM1xM3-5 | SEQ ID NO: 372 | VKHLYVFADVIELP | WRARCKNVA | | 3 |
| SEQ ID NO: 402 | | (a.a. 53-66 of | (a.a. 556- | | |
| | | SEQ ID NO: 402) | 564 of SEQ ID | | |
| | | | NO: 402) | | |
| PtIP-83cmbM1xM3-6 | SEQ ID NO: 373 | VKQLYIFCDVLELP | WQARCKNVA | | 6 |
| SEQ ID NO: 403 | | (a.a. 53-66 of | (a.a. 556- | | |
| | | SEQ ID NO: 403) | 564 of SEQ ID | | |
| | | | NO: 403) | | |
| PtIP-83cmbM1xM3-7 | SEQ ID NO: 374 | VKRFYIFADIVELP | WIGKCKNVA | | 5 |
| SEQ ID NO: 404 | | (a.a. 53-66 of | (a.a. 556- | | |
| | | SEQ ID NO: 404) | 564 of SEQ ID | | |
| | | | NO: 404) | | |
| PtIP-83cmbM1xM3-8 | SEQ ID NO: 375 | VKRFYIFADIVELP | WTVKCKNVA | | 5 |
| SEQ ID NO: 405 | | (a.a. 53-66 of | (a.a. 556- | | |
| | | SEQ ID NO: 405) | 564 of SEQ ID | | |
| | | | NO: 405) | | |
| PtIP-83cmbM1xM3-9 | SEQ ID NO: 376 | VKRLYIFADIIELP | WMVKCKNVA | | 5 |
| SEQ ID NO: 406 | | (a.a. 53-66 of | (a.a. 556- | | |
| | | SEQ ID NO: 406) | 564 of SEQ ID | | |
| | | | NO: 406) | | |
| PtIP-83cmbM1xM3-10 | SEQ ID NO: 377 | VKRLYIFADIIELP | WQARCKNVA | | 5 |
| SEQ ID NO: 407 | | (a.a. 53-66 of | (a.a. 556- | | |
| | | SEQ ID NO: 407) | 564 of SEQ ID | | |
| | | | NO: 407) | | |
| PtIP-83cmbM1xM3-11 | SEQ ID NO: 378 | VKRLYIFADIIELP | WRGKCKSVA | K52E, | 7 |
| SEQ ID NO: 408 | | (a.a. 53-66 of | (a.a. 556- | K505N | |
| | | SEQ ID NO: 408) | 564 of SEQ ID | | |
| | | | NO: 408) | | |
| PtIP-83cmbM1xM3-12 | SEQ ID NO: 379 | VKRLYIFADIIELP | WRGRCKTVA | | 6 |
| SEQ ID NO: 409 | | (a.a. 53-66 of | (a.a. 556- | | |
| | | SEQ ID NO: 409) | 564 of SEQ ID | | |
| | | | NO: 409) | | |
| PtIP-83cmbM1xM3-13 | SEQ ID NO: 380 | VKRLYIFTDVIELP | WIGKCKNVA | | 5 |
| SEQ ID NO: 410 | | (a.a. 53-66 of | (a.a. 556- | | |
| | | SEQ ID NO: 410) | 564 of SEQ ID | | |
| | | | NO: 410) | | |
| PtIP-83cmbM1xM3-14 | SEQ ID NO: 381 | VKRLYVFCDIIELP | WLARCKNVA | | 5 |
| SEQ ID NO: 411 | | (a.a. 53-66 of | (a.a. 556- | | |
| | | SEQ ID NO: 411) | 564 of SEQ ID | | |
| | | | NO: 411) | | |
| PtIP-83cmbM1xM3-15 | SEQ ID NO: 382 | VKRLYVFSDIIELP | WIGKCKNVA | | 5 |
| SEQ ID NO: 412 | | (a.a. 53-66 of | (a.a. 556- | | |
| | | SEQ ID NO: 412) | 564 of SEQ ID | | |
| | | | NO: 412) | | |
| PtIP-83cmbM1xM3-16 | SEQ ID NO: 383 | VKRLYVFSDIIELP | WRGRCKTVA | | 6 |
| SEQ ID NO: 413 | | (a.a. 53-66 of | (a.a. 556- | | |
| | | SEQ ID NO: 413) | 564 of SEQ ID | | |
| | | | NO: 413) | | |
| PtIP-83cmbM1xM3-17 | SEQ ID NO: 384 | VKRLYVFSDVIELP | WRGKCKSVA | | 4 |
| SEQ ID NO: 414 | | (a.a. 53-66 of | (a.a. 556- | | |
| | | SEQ ID NO: 414) | 564 of SEQ ID | | |
| | | | NO: 414) | | |
| PtIP-83cmbM1xM3-18 | SEQ ID NO: 385 | VKRLYVFSDVIELP | WRVKCKNVA | | 3 |
| SEQ ID NO: 415 | | (a.a. 53-66 of | (a.a. 556- | | |
| | | SEQ ID NO: 415) | 564 of SEQ ID | | |
| | | | NO: 415) | | |
| PtIP-83cmbM1xM3-19 | SEQ ID NO: 386 | VMRLYIFADVVELP | WRGKCKSVA | | 4 |
| SEQ ID NO: 416 | | (a.a. 53-66 of | (a.a. 556- | | |
| | | SEQ ID NO: 416) | 564 of SEQ ID | | |
| | | | NO: 416) | | |
| PtIP-83cmbM1xM3-20 | SEQ ID NO: 387 | VRHLYIFCDVIELP | WIGKCKNVA | | 7 |
| SEQ ID NO: 417 | | (a.a. 53-66 of | (a.a. 556- | | |
| | | SEQ ID NO: 417) | 564 of SEQ ID | | |
| | | | NO: 417) | | |
| PtIP-83cmbM1xM3-21 | SEQ ID NO: 388 | VRHLYIFSDVVELP | WMVKCKNVA | | 6 |
| SEQ ID NO: 418 | | (a.a. 53-66 of | (a.a. 556- | | |
| | | SEQ ID NO: 418) | 564 of SEQ ID | | |
| | | | NO: 418) | | |
| PtIP-83cmbM1xM3-22 | SEQ ID NO: 389 | VRHLYIFSDVVELP | WRGKCKSVA | K505N | 7 |
| SEQ ID NO: 419 | | (a.a. 53-66 of | (a.a. 556- | | |
| | | SEQ ID NO: 419) | 564 of SEQ ID | | |
| | | | NO: 419) | | |
| PtIP-83cmbM1xM3-23 | SEQ ID NO: 390 | VRQLYVFCDVLVLP | WHGKCKNVA | | 7 |
| SEQ ID NO: 420 | | (a.a. 53-66 of | (a.a. 556- | | |
| | | SEQ ID NO: 420) | 564 of SEQ ID | | |
| | | | NO: 420) | | |
| PtIP-83cmbM1xM3-24 | SEQ ID NO: 391 | VRQLYVFCDVLVLP | WLGRCKNVA | | 8 |
| SEQ ID NO: 421 | | (a.a. 53-66 of | (a.a. 556- | | |
| | | SEQ ID NO: 421) | 564 of SEQ ID | | |
| | | | NO: 421) | | |
| PtIP-83cmbM1xM3-25 | SEQ ID NO: 392 | VRQLYVFCDVLVLP | WRGKCKSVA | M1I | 8 |
| SEQ ID NO: 422 | | (a.a. 53-66 of | (a.a. 556- | | |
| | | SEQ ID NO: 422) | 564 of SEQ ID | | |
| | | | NO: 422) | | |
| PtIP-83cmbM1xM3-26 | SEQ ID NO: 393 | VRRLYIFADILELP | WMVKCKNVA | | 6 |
| SEQ ID NO: 423 | | (a.a. 53-66 of | (a.a. 556- | | |
| | | SEQ ID NO: 423) | 564 of SEQ ID | | |
| | | | NO: 423) | | |
| PtIP-83cmbM1xM3-27 | SEQ ID NO: 394 | VRRLYVFCDVVVLP | WRARCKNVA | | 4 |
| SEQ ID NO: 424 | | (a.a. 53-66 of | (a.a. 556- | | |
| | | SEQ ID NO: 424) | 564 of SEQ ID | | |
| | | | NO: 424) | | |
| PtIP-83cmbM1xM3-28 | SEQ ID NO: 395 | VRRLYVFTDVLVLP | WIGKCKNVA | | 6 |
| SEQ ID NO: 425 | | (a.a. 53-66 of | (a.a. 556- | | |
| | | SEQ ID NO: 425) | 564 of SEQ ID | | |
| | | | NO: 425) | | |
| PtIP-83cmbM1xM3-29 | SEQ ID NO: 396 | VRRLYVFTDVLVLP | WRARCKNVA | | 5 |
| SEQ ID NO: 426 | | (a.a. 53-66 of | (a.a. 556- | | |
| | | SEQ ID NO: 426) | 564 of SEQ ID | | |
| | | | NO: 426) | | |
| PtIP-83cmbM1xM3-30 | SEQ ID NO: 397 | VRRLYVFTDVLVLP | WTVKCKNVA | | 6 |
| SEQ ID NO: 427 | | (a.a. 53-66 of | (a.a. 556- | | |
| | | SEQ ID NO: 427) | 564 of SEQ ID | | |
| | | | NO: 427) | | |

### Example 14

### PtIP-83Aa Variants with Multiple Amino Acid Substitutions

[0524] To create variants of PtIP-83Aa (SEQ ID NO: 1) with multiple amino acid changes, variant libraries were generated by family shuffling (Chia-Chun J. Chang et al, 1999, Nature Biotechnology 17, 793-797) of the polynucleotide (SEQ ID NO: 2) encoding PtIP-83Aa (SEQ ID NO: 1) and the polynucleotide (SEQ ID NO: 2) encoding PtIP-83Cb (SEQ ID NO: 7). Mutation rates of the libraries were controlled by varying the regions of PtIP-83Aa (SEQ ID NO: 1) and PtIP-83Cb (SEQ ID NO: 7) which were included in the shuffling library reaction. Five libraries were generated between the two variants. In the first library (83FS-1), the full length gene sequence from both PtIP-83Aa (SEQ ID NO: 2) and PtIP-83Cb (SEQ ID NO: 8) were included in the shuffling reaction. In the second library (83FS-2), fragments containing nt: 1114-2604 of SEQ ID NO: 2 (encoding PtIP-83Aa (SEQ ID NO: 1)) and nt: 1072-2559 of SEQ ID NO: 8 (encoding PtIP-83Cb (SEQ ID NO: 7)) were shuffled. The shuffled fragments were then combined with nt: 1-1113 of SEQ ID NO: 2 (encoding PtIP-83Aa (SEQ ID NO: 1)) by Gibson Assembly (New England Biolabs). In a third library (83FS-3), the 5′ and 3′ regions of the two variants were shuffled in separate reactions. The 5′ reaction, containing shuffled fragments from nt: 1-1113 of SEQ ID NO: 2 (encoding PtIP-83Aa (SEQ ID NO: 1)) and nt:1-1071 of SEQ ID NO: 8 (encoding PtIP-83Cb (SEQ ID NO: 7)), and the 3′ reaction, containing shuffled fragments from nt: 1114-2604 of SEQ ID NO: 2 (encoding PtIP-83Aa (SEQ ID NO: 1)) and nt: 1072-2559 of SEQ ID NO: 8 (encoding PtIP-83Cb (SEQ ID NO: 7)), were then combined by Gibson Assembly. In a fourth library (83FS-4), fragments from the 5′ region of each variant (nt: 1-1113 of SEQ ID NO: 2 (encoding PtIP-83Aa (SEQ ID NO: 1)) and nt:1-1071 of SEQ ID NO: 8 (encoding PtIP-83Cb (SEQ ID NO: 7)) were shuffled with additional primers spiked into the assembly reaction to promote crossovers between the two variants. The shuffled 5′ region was then combined by Gibson assembly with the 3′ region of either SEQ ID NO: 2 (encoding PtIP-83Aa (SEQ ID NO: 1)) or SEQ ID NO: 8 (encoding PtIP-83Cb (SEQ ID NO: 7)). In the fifth library (83FS-5), single crossover variants were generated manually between SEQ ID NO: 2 (encoding PtIP-83Aa (SEQ ID NO: 1)) and SEQ ID NO: 8 (encoding PtIP-83Cb (SEQ ID NO: 7)) using Gibson assembly.

[0525] All shuffled libraries were cloned into a plant transient expression vector containing the viral dMMV promoter for subsequent transient expression in bush bean and SBL activity assays as described in Example 4. Active variants, defined as having an average activity score of ≤60% of leaf disk eaten, were sent for sequence identification. In library 83FS-1, 197 variants were screened and 45 active unique variants were sequence identified. In library 83FS-2, 96 variants were screened and 32 active unique variants were sequence identified. In library 83FS-3, 192 variants were screened and 13 active unique variants were sequence identified. In library 83FS-4, 96 variants were screened and 6 unique active variants were sequence identified. In library 83FS-5, four of the eleven constructed single cross variants were found to be active.

[0526] Sequence identity of active variants to PtIP-83Aa was calculated using the Needleman-Wunsch algorithm, as implemented in the Needle program (EMBOSS tool suite). The percent identity compared to PtIP-83Aa (SEQ ID NO: 1), variant designation, nucleotide sequences, and amino acid sequences of the resulting active PtIP-83Aa polypeptide variants from all libraries are summarized in Table 24. Table 25 summarizes the % identity of the active variants compared to PtIP-83Aa (SEQ ID NO: 1), the number of variants with each % identity, and the variant identification.

TABLE 24

| % Identity to | | | |
|---|---|---|---|
| PtIP-83Aa | | | |
| (SEQ ID NO: 1) | Variant | Polynucleotide | Polypeptide |
| 76 | S04359885 | SEQ ID NO: 428 | SEQ ID NO: 518 |
| 76 | S04359888 | SEQ ID NO: 429 | SEQ ID NO: 519 |
| 73 | S04359896 | SEQ ID NO: 430 | SEQ ID NO: 520 |
| 73 | S04359899 | SEQ ID NO: 431 | SEQ ID NO: 521 |
| 77 | S04359902 | SEQ ID NO: 432 | SEQ ID NO: 522 |
| 76 | S04359909 | SEQ ID NO: 433 | SEQ ID NO: 523 |
| 77 | S04359911 | SEQ ID NO: 434 | SEQ ID NO: 524 |
| 75 | S04359942 | SEQ ID NO: 435 | SEQ ID NO: 525 |
| 74 | S04359944 | SEQ ID NO: 436 | SEQ ID NO: 526 |
| 73 | S04359948 | SEQ ID NO: 437 | SEQ ID NO: 527 |
| 81 | S04359951 | SEQ ID NO: 438 | SEQ ID NO: 528 |
| 80 | S04359988 | SEQ ID NO: 439 | SEQ ID NO: 529 |
| 81 | S04359991 | SEQ ID NO: 440 | SEQ ID NO: 530 |
| 77 | S04360034 | SEQ ID NO: 441 | SEQ ID NO: 531 |
| 76 | S04360059 | SEQ ID NO: 442 | SEQ ID NO: 532 |
| 73 | S04360064 | SEQ ID NO: 443 | SEQ ID NO: 533 |
| 73 | S04360087 | SEQ ID NO: 444 | SEQ ID NO: 534 |
| 73 | S04360095 | SEQ ID NO: 445 | SEQ ID NO: 535 |
| 77 | S04360104 | SEQ ID NO: 446 | SEQ ID NO: 536 |
| 74 | S04360110 | SEQ ID NO: 447 | SEQ ID NO: 537 |
| 77 | S04360119 | SEQ ID NO: 448 | SEQ ID NO: 538 |
| 73 | S04360122 | SEQ ID NO: 449 | SEQ ID NO: 539 |
| 75 | S04360130 | SEQ ID NO: 450 | SEQ ID NO: 540 |
| 78 | S04360132 | SEQ ID NO: 451 | SEQ ID NO: 541 |
| 93 | S04360136 | SEQ ID NO: 452 | SEQ ID NO: 542 |
| 93 | S04360141 | SEQ ID NO: 453 | SEQ ID NO: 543 |
| 77 | S04360143 | SEQ ID NO: 454 | SEQ ID NO: 544 |
| 76 | S04360146 | SEQ ID NO: 455 | SEQ ID NO: 545 |
| 75 | S04360160 | SEQ ID NO: 456 | SEQ ID NO: 546 |
| 79 | S04360435 | SEQ ID NO: 457 | SEQ ID NO: 547 |
| 77 | S04360466 | SEQ ID NO: 458 | SEQ ID NO: 548 |
| 77 | S04360467 | SEQ ID NO: 459 | SEQ ID NO: 549 |
| 73 | S04360469 | SEQ ID NO: 460 | SEQ ID NO: 550 |
| 78 | S04360485 | SEQ ID NO: 461 | SEQ ID NO: 551 |
| 80 | S04360504 | SEQ ID NO: 462 | SEQ ID NO: 552 |
| 76 | S04360545 | SEQ ID NO: 463 | SEQ ID NO: 553 |
| 77 | S04360574 | SEQ ID NO: 464 | SEQ ID NO: 554 |
| 76 | S04360579 | SEQ ID NO: 465 | SEQ ID NO: 555 |
| 74 | S04360592 | SEQ ID NO: 466 | SEQ ID NO: 556 |
| 79 | S04360619 | SEQ ID NO: 467 | SEQ ID NO: 557 |
| 77 | S04360626 | SEQ ID NO: 468 | SEQ ID NO: 558 |
| 77 | S04360660 | SEQ ID NO: 469 | SEQ ID NO: 559 |
| 78 | S04360664 | SEQ ID NO: 470 | SEQ ID NO: 560 |
| 77 | S04360699 | SEQ ID NO: 471 | SEQ ID NO: 561 |
| 76 | S04360787 | SEQ ID NO: 472 | SEQ ID NO: 562 |
| 99 | S04363576 | SEQ ID NO: 473 | SEQ ID NO: 563 |
| 97 | S04363577 | SEQ ID NO: 474 | SEQ ID NO: 564 |
| 95 | S04363578 | SEQ ID NO: 475 | SEQ ID NO: 565 |
| 97 | S04363579 | SEQ ID NO: 476 | SEQ ID NO: 566 |
| 97 | S04363580 | SEQ ID NO: 477 | SEQ ID NO: 567 |
| 95 | S04363584 | SEQ ID NO: 478 | SEQ ID NO: 568 |
| 97 | S04363585 | SEQ ID NO: 479 | SEQ ID NO: 569 |
| 96 | S04363587 | SEQ ID NO: 480 | SEQ ID NO: 570 |
| 96 | S04363588 | SEQ ID NO: 481 | SEQ ID NO: 571 |
| 97 | S04363593 | SEQ ID NO: 482 | SEQ ID NO: 572 |
| 95 | S04363594 | SEQ ID NO: 483 | SEQ ID NO: 573 |
| 96 | S04363600 | SEQ ID NO: 484 | SEQ ID NO: 574 |
| 97 | S04363605 | SEQ ID NO: 485 | SEQ ID NO: 575 |
| 96 | S04363608 | SEQ ID NO: 486 | SEQ ID NO: 576 |
| 96 | S04363609 | SEQ ID NO: 487 | SEQ ID NO: 577 |
| 97 | S04363612 | SEQ ID NO: 488 | SEQ ID NO: 578 |
| 94 | S04363619 | SEQ ID NO: 489 | SEQ ID NO: 579 |
| 97 | S04363623 | SEQ ID NO: 490 | SEQ ID NO: 580 |
| 94 | S04363625 | SEQ ID NO: 491 | SEQ ID NO: 581 |
| 93 | S04363626 | SEQ ID NO: 492 | SEQ ID NO: 582 |
| 97 | S04363629 | SEQ ID NO: 493 | SEQ ID NO: 583 |
| 96 | S04363631 | SEQ ID NO: 494 | SEQ ID NO: 584 |
| 95 | S04363632 | SEQ ID NO: 495 | SEQ ID NO: 585 |
| 94 | S04363638 | SEQ ID NO: 496 | SEQ ID NO: 586 |
| 98 | S04363643 | SEQ ID NO: 497 | SEQ ID NO: 587 |
| 97 | S04363644 | SEQ ID NO: 498 | SEQ ID NO: 588 |
| 97 | S04363646 | SEQ ID NO: 499 | SEQ ID NO: 589 |
| 95 | S04363648 | SEQ ID NO: 500 | SEQ ID NO: 590 |
| 96 | S04363659 | SEQ ID NO: 501 | SEQ ID NO: 591 |
| 94 | S04363660 | SEQ ID NO: 502 | SEQ ID NO: 592 |
| 96 | S04363662 | SEQ ID NO: 503 | SEQ ID NO: 593 |
| 97 | S04363663 | SEQ ID NO: 504 | SEQ ID NO: 594 |
| 64 | S04367796 | SEQ ID NO: 505 | SEQ ID NO: 595 |
| 83 | S04367808 | SEQ ID NO: 506 | SEQ ID NO: 596 |
| 76 | S04367849 | SEQ ID NO: 507 | SEQ ID NO: 597 |
| 78 | S04367850 | SEQ ID NO: 508 | SEQ ID NO: 598 |
| 80 | S04367851 | SEQ ID NO: 509 | SEQ ID NO: 599 |
| 78 | S04367860 | SEQ ID NO: 510 | SEQ ID NO: 600 |
| 77 | S04367872 | SEQ ID NO: 511 | SEQ ID NO: 601 |
| 77 | S04367882 | SEQ ID NO: 512 | SEQ ID NO: 602 |
| 79 | S04367903 | SEQ ID NO: 513 | SEQ ID NO: 603 |
| 78 | S04367917 | SEQ ID NO: 514 | SEQ ID NO: 604 |
| 78 | S04367945 | SEQ ID NO: 515 | SEQ ID NO: 605 |
| 80 | S04367977 | SEQ ID NO: 516 | SEQ ID NO: 606 |
| 78 | S04367983 | SEQ ID NO: 517 | SEQ ID NO: 607 |
| 87 | S04371015 | SEQ ID NO: 718 | SEQ ID NO: 728 |
| 88 | S04371039 | SEQ ID NO: 719 | SEQ ID NO: 729 |
| 84 | S04371062 | SEQ ID NO: 720 | SEQ ID NO: 730 |
| 86 | S04371086 | SEQ ID NO: 721 | SEQ ID NO: 731 |
| 73 | S04382521 | SEQ ID NO: 722 | SEQ ID NO: 732 |
| 84 | S04382532 | SEQ ID NO: 723 | SEQ ID NO: 733 |
| 98 | S04382574 | SEQ ID NO: 724 | SEQ ID NO: 734 |
| 88 | S04382581 | SEQ ID NO: 725 | SEQ ID NO: 735 |
| 89 | S04382591 | SEQ ID NO: 726 | SEQ ID NO: 736 |
| 87 | S04382601 | SEQ ID NO: 727 | SEQ ID NO: 737 |

TABLE 25

| % Identity to | | |
|---|---|---|
| PtIP-83Aa | | |
| (SEQ ID NO: 1) | # variants | Variants |
| 99 | 1 | S04363576 |
| 98 | 2 | S04363643, S04382574 |
| 97 | 12 | S04363646, S04363629, S04363612, |
| | | S04363663, S04363585, S04363580, |
| | | S04363623, S04363579, S04363605, |
| | | S04363644, S04363593, S04363577 |
| 96 | 8 | S04363662, S04363587, S04363631, |
| | | S04363659, S04363608, S04363600, |
| | | S04363588, S04363609 |
| 95 | 5 | S04363648, S04363632, S04363584, |
| | | S04363594, S04363578 |
| 94 | 4 | S04363660, S04363619, S04363625, |
| | | S04363638 |
| 93 | 3 | S04363626, S04360136, S04360141 |
| 89 | 1 | S04382591 |
| 88 | 2 | S04371039, S04382581 |
| 87 | 2 | S04371015, S04382601 |
| 86 | 1 | S04371086 |
| 84 | 2 | S04371062, S04382532 |
| 83 | 1 | S04367808 |
| 81 | 2 | S04359951, S04359991 |
| 80 | 4 | S04360504, S04367851, S04367977, |
| | | S04359988 |
| 79 | 3 | S04367903, S04360435, S04360619 |
| 78 | 8 | S04367983, S04367945, S04367850, |
| | | S04360485, S04367917, S04360664, |
| | | S04360132, S04367860 |
| 77 | 14 | S04367872, S04360467, S04360119, |
| | | S04367882, S04360104, S04360626, |
| | | S04359902, S04360143, S04359911, |
| | | S04360034, S04360660, S04360574, |
| | | S04360466, S04360699 |
| 76 | 9 | S04359909, S04360787, S04359888, |
| | | S04359885, S04360579, S04360146, |
| | | S04360059, S04367849, S04360545 |
| 75 | 3 | S04359942, S04360130, S04360160 |
| 74 | 3 | S04360592, S04360110, S04359944 |
| 73 | 9 | S04359896, S04360122, S04360469, |
| | | S04360087, S04359899, S04360064, |
| | | S04360095, S04359948, S04382521 |
| 64 | 1 | S04367796 |

### Example 14

### Specific Binding of Certain PtIP-83 Proteins to Insect Brush Border Membrane Vesicle (BBMV) and Heterologous Competition Binding Studies

[0527] Insect midguts were isolated from fourth instar insects by making a longitudinal incision through the cuticle along the dorsal side of the larvae. Midguts were opened to remove the peritrophic membrane and food bolus and separated from the carcass. Isolated guts were cleaned of fat bodies and other non-midgut tissues and immediately flash frozen in liquid nitrogen for storage at −80° C. until needed. Brush border membrane vesicles (BBMVs) were prepared from stored midgut tissue essentially as described in Wolfersberger, M. et al. (Comp Bioch Physiol (1987)). Protein levels were quantified by the colorimetric bicinchoninic acid (BCA) method (Pierce, Rockland, Ill., USA). BBMV quantities were based on these protein determinations. Aminopeptidase N activity was measured and used as an indicator of apical membrane enrichment during BBMV preparation. The assay measured the hydrolysis of the artificial substrate 1 mM L-leucine-p-nitroanilide (Sigma Aldrich, St. Louis, Mo.) when mixed with tissue samples in buffer consisting of 25 mM NaCl and 10 mM Tris-HCl, pH 8.0, by tracking change in absorbance at 405 nm in a 96-well plate reader (Molecular Devices, Sunnyvale, Calif.). In preparation for binding and competition, PtIP-83Aa (SEQ ID NO: 1) and PtIP-83Cb (SEQ ID NO: 7) proteins were dialyzed overnight at 4° C. in binding buffer which consisted of 20 mM Na₂CO₃, 20 mM NaHCO₃, pH 9.6, 100 mM NaCl and 0.2% Tween-20®. To track specific binding, each protein was labeled with the fluorescent indicator Alexa Fluor®488 (Thermo Fisher Scientific) according to manufacturer's instructions. Conditions for measuring specific binding were optimized by varying the amount of BBMVs and concentration of labeled protein while testing the competition caused by a molar excess of unlabeled protein. Optimal conditions were determined for each protein/insect combination as follows: 10 nM Alexa-PtIP-83Aa and 30 μg CEW BBMVs; 4 nM Alexa-PtIP-83Aa and 20 μg FAW BBMVs; 20 nM Alexa-PtIP-83Cb and 30 μg CEW or FAW BBMVs. Binding assays consisted of mixing an optimal amount of BBMVs and labeled protein in 100 microliters of binding buffer in the absence and presence of different concentrations of unlabeled protein. The mixtures were incubated at 25° C. for 1 hour while maintaining constant agitation using a high velocity orbital shaker. Following the incubation, ice cold binding buffer (1.0 ml) was added to each reaction and the BBMVs with bound proteins were collected by centrifugation (10 min at 20,000 g) at 4° C. to separate unbound proteins. The BBMV pellet was then washed again with 1.0 ml of ice cold binding buffer with centrifugation (10 min, 20000 g). The final BBMV pellet was then suspended in LDS sample buffer with reducing reagent (Nupage®, ThermoFisher Scientific), boiled for 5 minutes and subjected to SDS-PAGE (Novex NuPage® 4-12% Bis-Tris gel using MOPS running buffer (Thermo Fisher Scientific)). Upon completion of electrophoresis, Alexa-labeled toxins were detected as fluorescent bands within the gels. The gel image was captured electronically using a digital imaging system (LAS-4010, GE Healthcare). Densitometry measurements of gel images were used to quantify the binding of the labeled toxins using molecular imaging software (TotalLab, Newcastle, UK). EC₅₀ values (defined as the concentration of unlabeled protein that reduced the specific binding of the labeled protein by 50%) were determined to approximate the binding affinity for each protein. The EC₅₀ values were measured by incubating BBMVs with the labeled protein in the absence and presence of increasing concentrations of unlabeled protein (homologous competition) until maximal reduction in specific binding was achieved. Densitometry values were fit to a logistic equation using OriginPro 2015 (Originlab, Northampton, Mass., USA) to determine the point of 50% reduction. For heterologous competition evaluations, optimal binding conditions for the labeled protein were used and were tested at a saturating concentration of the competing unlabeled protein. The binding signals measured in the presence of unlabeled protein were normalized to the signal measured for labeled protein alone. Values from replicates were averaged and specific binding was calculated by subtracting the nonspecific binding signal. PtIP-83Aa (SEQ ID NO: 1) and PtIP-83Cb (SEQ ID NO: 7) share about 71% protein sequence identity. Heterologous competitive binding experiments performed using Corn Earworm (CEVV) BBMVs showed no significant competition in either direction between these two proteins indicating they recognize different target sites from each other (FIG. 6). Similar results were obtained with BBMVs prepared from Fall Army Worm (FAVV) and Soybean Looper (SBL). Further heterologous competitive binding experiments showed that PtIP-83Aa (SEQ ID NO: 1) and I PtIP-83Gb (SEQ ID NO: 798) also showed no significant competition in either direction between these two proteins indicating they recognize different target sites from each other. Table 26 represents the results of all heterologous competitive binding experiments performed.

TABLE 26
Heterologous Competition Binding Results

| Labeled Protein | Unlabeled Protein | CEW | SBL | FAW |
|---|---|---|---|---|
| PtIP-83Aa | PtIP-83Cb | No | No | No |
| (SEQ ID NO: 1) | (SEQ ID NO: 7) | | | |
| PtIP-83Cb | PtIP-83Aa | No | No | No |
| (SEQ ID NO: 7) | (SEQ ID NO: 1) | | | |
| PtIP-83Aa | PtIP-83Gb | No | NT | No |
| (SEQ ID NO: 1) | (SEQ ID NO: 798) | | | |
| PtIP-83Gb | PtIP-83Aa | No | NT | No |
| (SEQ ID NO: 798) | (SEQ ID NO: 1) | | | |
| PtIP-83Cb | PtIP-83Gb | Yes | NT | NT |
| (SEQ ID NO: 7) | (SEQ ID NO: 798) | | | |
| PtIP-83Gb | PtIP-83Cb | Yes | NT | NT |
| (SEQ ID NO: 798) | (SEQ ID NO: 7) | | | |

*Yes—binding sites are shared in heterologous competition binding assay; No—binding sites are not shared in heterologous binding assay; NT—Not tested

[0528] The above description of various illustrated embodiments of the disclosure is not intended to be exhaustive or to limit the scope to the precise form disclosed. While specific embodiments of and examples are described herein for illustrative purposes, various equivalent modifications are possible within the scope of the disclosure, as those skilled in the relevant art will recognize. The teachings provided herein can be applied to other purposes, other than the examples described above. Numerous modifications and variations are possible in light of the above teachings and, therefore, are within the scope of the appended claims.

[0529] These and other changes may be made in light of the above detailed description. In general, in the following claims, the terms used should not be construed to limit the scope to the specific embodiments disclosed in the specification and the claims.

[0530] The entire disclosure of each document cited (including patents, patent applications, journal articles, abstracts, manuals, books or other disclosures) in the Background, Detailed Description, and Examples is herein incorporated by reference in their entireties.

[0531] Efforts have been made to ensure accuracy with respect to the numbers used (e.g. amounts, temperature, concentrations, etc.) but some experimental errors and deviations should be allowed for. Unless otherwise indicated, parts are parts by weight, molecular weight is average molecular weight; temperature is in degrees centigrade; and pressure is at or near atmospheric.

The application's sequence listing, which the Patent Office published only in electronic form, follows.

SEQUENCE LISTING (1026 sequences)

SEQ ID NO: 1 - protein, 867 aa, Adiantum pedatum
MALVDYGKLFEDLNQISMGVLDRVEFSEVMVIHRMYVRLADLNVGQLEGAEKVKRLYVFADVVELPVVEWRWPPQIPGSVTVIILCRLLQWPTDGRQSDTELHLTFMKLHAIQREENRWEITAADGMNWGVYIHAEEVQVGVLTMSWSSVLRVSALRSVITSGFRAVSVFEVPGSVRSTLGATLRPDHALYSTTMQATPNASHISAFNLRIVSPSAYRVCPLQNDTDTYLGIPADVAAVLPVDVVTDPNILLGMQTTVHIAELVKACHPSPDVVSAVGEHLNWLNKLLLPLKESTQLQGSESYKECLALLGRVHAAMKMVRIGLVVPQLQYRMYGSLINQMAQVAQNYDREFKQFKLFIIQNQILGSYLLQQNRAFAERELQMESFHAAVISQRREELDNTFAKMDRLSGQMEAESSAMEQAKKEMDEGLRQFQNRQVANALFAVLSAVAQIGLAFLTAGATAPGAVASAGQAVSIAGQAAQGLRRVVEILEQLEAVMEVVAAVKDLVDSLEQVGQIVDAPVMPELPSEADWSIFVNEVEAVAEGMPTEVSEVPVWRAKCKNVAALGREMSITAVQMSELQYDIWVQGMMRDMARSQADRLAAIQPADLTNYLEMATQMDMRTTRMLLGLLNILRIQNAALRYEYLLMPTELTTWPLGMDTVGDLLIAQENAALIGLMQLGPSSDFTSRHVVKDIPVNLLLDGEDWEFEIPVQAGMSSFPSSWSRVRIRHLEMHFVKEASGIGGEIIHQPTTQTGTVYILLQGSTIFHDRRRDQVLPFQAAAPLNYHYAYRLDTGDSTLTNEPSEQFANKFMQMTPFTRWRLRLSASAKENAGLAFPTATALDSTTQIVITFHVTAIRQIDWRHDEE

SEQ ID NO: 2 - DNA, 2601 bp, Adiantum pedatum
atggctctcgtggattacggcaagcttttcgaggatctgaaccagataagcatgggtgtactggatcgggtagagttttcagaggtgatggtgatccacaggatgtatgtgaggctagctgatctgaatgtggggcagctcgagggagccgagaaagtgaagcggttgtatgtgtttgcggacgtggtggagctaccagtcgtggaatggcggtggccgccgcaaataccaggatcggtgacggtgatcatattgtgtcgtcttcttcaatggccaactgatgggaggcagtcggacaccgagctccacctgacattcatgaagttgcatgccatacaacgagaggaaaatcggtgggagataaccgcagcagatggcatgaactggggagtttacatacacgcagaggaagtacaggttggcgtgctgacaatgtcatggtcttcggtacttagagtttcggcacttcgctctgttataacctccggctttcgcgccgttagtgtgtttgaggtaccgggaagtgtaaggtccacccttggagctactttaaggcccgatcacgccttatatagtacaactatgcaagccacacccaacgcatcgcatattagtgcttttaaccttcgcatagtttccccgtcggcatatcgtgtttgtcctctccaaaatgacacagatacctacttaggtattccagcagacgtggcggcagttcttccagtagacgtggtgactgatcctaacatcttgctgggcatgcagacaacggtacacattgcggagctagtcaaggcatgtcatccgtcacccgatgttgtgagcgctgtaggggagcacctgaactggctcaacaaactcttactcccacttaaggaatcgactcagttgcaaggaagcgagtcgtacaaggagtgccttgcactcttgggtcgtgttcacgctgcgatgaagatggtgagaattggcttagtagtgccccagctgcaatacagaatgtacggtagcctcatcaaccaaatggcccaagtagcacaaaactacgaccgagaattcaagcaattcaaattattcatcatccaaaatcaaatccttggcagctatttgctgcagcagaacagggcatttgctgagagggagctgcagatggagagctttcatgctgctgtcatttctcaaagaagggaggagttggacaatacattcgcaaagatggaccgattgagcgggcaaatggaggcagagagtagtgcaatggagcaagccaaaaaggaaatggacgaaggattgaggcagttccagaataggcaagttgcgaacgccctctttgccgttcttagcgctgtagctcagattgggcttgcattccttacggctggtgcaacggctcctggagctgtggcgtcggcggggcaagctgtgagcatagcaggtcaggcggcgcaaggtctgcgaagggtggtggaaattctagagcagctggaggctgtgatggaggttgtggctgctgtgaaggacctcgtggattcattggaacaggtaggtcagattgtggacgcaccggtgatgccggaattgccctcagaggcggactggtccatttttgtgaacgaggtggaggccgtggcagagggcatgccaacggaagtctcggaggttccggtgtggagggccaagtgcaagaatgtggctgcactgggtcgggagatgagcatcacggcagtacagatgtcggagctgcagtatgacatctgggtgcaaggcatgatgcgggatatggctcgaagccaggcagacaggctggccgcaattcaacccgcggaccttaccaactatttggagatggctacccagatggatatgcggactacgaggatgctgctggggctcctcaacatattgcgcatccagaatgcggcgctcaggtacgagtatcttctaatgcccacggagctcacaacatggccactgggtatggataccgtgggtgacttgctcatcgcgcaggagaatgctgcactgataggattaatgcagctagggccctcatctgatttcacgagcaggcatgtggtgaaagacatacctgtgaacttgctgctcgatggcgaggattgggagtttgagattcctgtgcaagctggcatgtccagcttcccttccagctggtctcgcgtccgtattcggcacctggagatgcactttgtgaaggaggccagcggtattggtggtgagattatccaccagcctaccacccagactgggaccgtttacatccttctgcagggttccactatcttccatgaccgcagaagagaccaggtgttgccttttcaggccgctgctccgctcaactaccattacgcgtaccgcctcgacaccggcgactccactctcacaaacgaaccctctgaacagtttgccaacaagttcatgcagatgacacccttcacccgttggaggcttcgtctgtctgcgtccgcaaaagagaatgcaggattagcctttcccacggctacagcacttgactccactacccagattgtcatcactttccatgttacggccatcagacaaattgactggcggcacgacgaagag

SEQ ID NO: 3 - protein, 886 aa, Microsorum musifolium
MEYSSLYGDVNQVSLRFQNMEFSEVMVVHRMHVRLEELDMTGVEGIEKVKRLYVLADVVELPSTATQVFQYLRLPASISAIILCRVLYIPEVDQRPHMAQCSLDFPFMRLHVVGSVHENVGGVMQAFSSDATPSNIGIYLHADRFIYRQATSPASNFVLPLDVRVSFGSSTYSGPTIRPDWQNLNVSNISYGPQHLSKGPPLTSSDSDLQRSDEIELLAQQDVWSPLLHVAFSPTALPGNIPGTQGLFRPSSACSFFHVPPPDVPANVLTDPSIILGMQMNMLIAELVLAAHNSPQVMNVITKHVLWLNKILLQVASPNDDILALLFRIQAFMKMAKQPRFVVPRLQYHMYGSLINRMVQVAQNYDQEFKQLKLFIAQNEILGSYLLQQNRAFAEREKEMSAFHSQVVSMRRSELQSAIQTMDNLSLQMESESEAMNEAQENMVEAIQEYERKLLARALFSVIGAIASVALAFATGGATAPGAVAAAGGAVAAAGRLAAGLQKVVDILQGLQAVMEVVVAIRDIVESLKNMGQLVEAPEMPEMPTDADWLIFVNEVEAVAEQVPTEVAEVPVWKAKCKNVAVLGQAMCTTAAYISELQYQITVEKMLQEIAQRQADRLVGISAADLSSYTEMASQIDMRTTRILLELIKMLYIQNAAIKYEYLYDANEKLNSWPVSMETVWTMLLQQENAALLGLLDLGPTNDFTVTYAVKDIPTKLLVDGFDWNFEIAVEDSAIFPSGWSRVRIRYVELKFDQQGADSSNIVIHQPSTNTGLVYMLLQGSRFLHDRKHEEVMDYEASLGPVYAYAYDLNTGATTLNNIPSQQYANTFMQMTPFNAWRLRLSASAVENQGLVFPTATSPDNTTQISITFYVTAIRRIDHRQEGDVE

SEQ ID NO: 4 - DNA, 2658 bp, Microsorum musifolium
atggaatatagcagcttgtacggtgatgtgaaccaagtgagcctgaggttccagaacatggagttctctgaggtcatggtggtgcatcggatgcatgtgcgcctcgaggagcttgacatgacgggggtggagggcatcgagaaggtgaaacgcctgtacgtgctggcggacgtggtggagctgccttccacagccacccaggtgtttcagtatctgcgccttcctgcctccatttcagcgattatcctctgccgtgttctctatatccctgaagttgatcagaggccccacatggctcaatgctcgctcgacttcccgttcatgcgcctccatgtcgtcggatctgtacacgagaatgttgggggtgttatgcaagccttttcctccgacgccacccccagcaatattggcatctacctccatgctgaccgcttcatctaccgccaggccacatctccggccagcaactttgtcttgcccctggatgtaagggtcagctttggcagctctacctactcgggcccaaccatccgtcccgactggcaaaaccttaatgtctccaacatcagctacgggccacagcatttgtccaagggcccacccctcacatcctcagactccgacttgcagagatctgacgagatcgagctcctggcgcagcaagatgtttggagccctcttttacatgtcgcgtttagcccgactgcactacctggcaacatcccgggtacacaaggactattccgaccctcctctgcatgcagcttcttccatgtgccgccaccggatgtccctgcgaacgtgctcactgatccttccatcatcttgggcatgcaaatgaacatgctcattgccgagcttgtcttggctgctcacaattcgccgcaggtcatgaacgtcatcactaagcatgtgctatggctcaacaagatcttgcttcaggttgcttcacccaatgatgatattttagcactcttgtttcgtatccaagcattcatgaagatggcaaagcaaccgcggtttgtggttccacggttgcagtaccacatgtacggtagccttatcaatcgaatggtgcaagtagcccagaattatgaccaggagttcaagcaactcaagcttttcatcgcacaaaatgagattttgggaagctatttgctacaacaaaatagggcttttgcagaaagggagaaggaaatgagtgcttttcactcgcaggtcgtgtcgatgaggagatctgagcttcagtctgccatacaaacaatggacaatttgagtttgcaaatggaatcagagagtgaggcgatgaacgaagcccaggagaacatggttgaagcaattcaagagtatgaaaggaaattacttgcaagagctctattttctgtgattggggcaatagcaagcgttgctcttgcatttgccactggtggtgcaactgcaccgggggcagtggcagcagccggaggggctgttgctgcagcagggaggttggcagcagggctccaaaaggttgtggacatcctacaaggcttgcaagcggtcatggaggttgtggtagccataagagacatcgtagaatcattgaaaaacatgggtcaactagtagaagctcccgagatgccagagatgccaacggatgcggactggttaatttttgtaaatgaggtggaggcagtggcagagcaagtgccaacagaagtggcagaggtcccagtgtggaaggctaagtgcaagaatgtggctgtgctagggcaagcaatgtgcaccacagcagcatatattagtgagctacagtatcagatcacggtggaaaagatgctacaagagattgcacagcgccaagcagacaggttggtggggatatcagcagcagatctatcgagctacacagagatggcatcacaaatagacatgcgtacaacccgaatcctccttgaactcatcaagatgttgtacattcaaaatgcagcaattaagtatgagtacttgtatgatgctaatgagaagcttaattcatggccagtgagcatggagactgtatggaccatgctcttgcaacaagagaatgcagctctcttgggcttgctagacttggggcccaccaatgatttcactgtaacctatgctgttaaagacatacctaccaagttgttagtagatgggtttgattggaattttgagatcgcggtggaggattctgcaatctttccatcaggatggtctcgtgttcgcatacgatatgttgagcttaaatttgaccaacaaggtgctgatagtagtaacattgtcatccaccagcctagcactaacactggcttagtctacatgctcttacaaggctcccggttcctccatgaccgcaaacatgaggaggtgatggactatgaggcaagcttgggacctgtatatgcatatgcttatgacctcaacactggtgcaaccactctcaacaacatcccctcacagcaatatgccaacacatttatgcaaatgacacccttcaacgcctggagacttcgcctctctgcctctgctgtggaaaatcagggattggtgtttcctacagcaacttctcctgacaatactacccaaatttccatcacattctatgtcactgctattcgacgcatagatcatcgacaagagggtgatgtggag

SEQ ID NO: 5 - protein, 853 aa, Adiantum trapeziforme
MDYSTLYRDLNQISIGVDRVEFSEVMVIHRMYVRLSDLNVGELPGAGRVKRVYVFADVVELAPRATLRDQMHMPGSVTVIVLCRLLQFPIDGSQATTLRLPFMQLHARVIEQNVKSEITATDGMNWGIYIYGEKVERSPLLPSNAILAVWADRCTITSARHNHVNAPGRIISTFTLGSGVTGITSMHGEPSLDPWNGVSLDSASPTAFSALPRQSRNISFTSIPVEVVTDPSILLGMQTTVLIAELVKVCRPPSPDMMSAVAEHALWLNDVLLQVVQNESQLQGTAPYNECLALLGRIECVMKIGRFVSVVPQLQYRMYGNLIKQMAQVAQNYDQEFKQFKLFIVQNQILGSYLLQKNKALADRELQMESFHSAVISQRRQELNTAIAKMERMSLQMEEENRAMEQAQKEMEEGLREFQNRQVARAVFAVLKAVAMIALVFVTAGATAPGAAASAGQAVSIAGQAAQALRRVVEILEGLEAVMEVVAAVKDLVDSLEQVGQIVGAPEMPDMPSEADWSIFVNEIEAVAEGMPTEVSEVPAWKAKCKNMAALGREMSITAVQISELQYEIWVQGLMRDIARSHADRLAAIQPVDLTNHLEMATHMDMRTTSMLIGLLNMLRIQNAALMYEYLLTPTELTVWPLGMDTVANLLIAQENAALVGLIQLGQSSNFTSRHVVKGIPVSLLLDGEDWEFEIPVQAGMSSFPFNWTRVRIRHLEMQFAQEASGGGGGEIIHQPSTRSGIVYILLQGSTIFHDRRRDEVMTFQAADPLNFQYAYRLDTGEATLTNEPSEDFANTFMQMTPFTRWRLRLSASASENAELAFPTATAPDSTTEVVITFHVTAIRQVDWRQEEE

SEQ ID NO: 6 - DNA, 2559 bp, Adiantum trapeziforme
atggattacagcacgctttacagggacctgaaccagataagcatcggtgtggaccgggtagagttctcagaggtgatggtgatccacaggatgtatgtaaggttgtctgatctgaatgtgggggagctccccggagccgggagagtgaagcgggtgtacgtgtttgcggatgtggtggagcttgcaccgcgtgcgacgctgcgggatcagatgcatatgccaggatcggtgacagtgatcgtattgtgtcgtcttcttcaatttccaatcgatgggtcgcaagctacaactctccggctgcctttcatgcagttgcatgccagagtcatagagcaaaatgtaaagtcggagataacagcaacagatggcatgaattggggaatctacatatacggggagaaagtagagaggagcccgctccttcctagcaatgcaatccttgcagtttgggcagatcgctgtactataacctcagcccgtcacaatcatgttaacgcacctgggagaataatatcgactttcacacttgggtcgggagtaacgggtataacctctatgcacggggaacccagtttggacccttggaatggtgtttctctcgactcagcttcccctacggcatttagtgctttacctcgccaaagtaggaatatatccttcacaagtattccagtagaggtggtgactgatcctagcatcttgctgggcatgcagaccaccgtgctcattgcggagctagtcaaggtatgtcgcccaccatcacccgacatgatgagtgctgtagcggagcacgcgctttggctcaatgatgtcttactccaagttgtccagaacgaatctcagttgcaagggactgcgccctacaacgagtgccttgcacttttgggtcgcattgaatgtgtgatgaaaatcgggagatttgtctcagtagtgcctcagctgcaatacagaatgtatggtaacctcatcaaacaaatggcccaagtagcacaaaactacgaccaagaattcaagcaattcaagttattcatcgtccaaaaccaaatccttggcagctatttgcttcagaagaacaaggcattagctgacagggagctgcagatggagagctttcattcagcggtcatttctcaaagaaggcaggagttgaatactgccatcgcaaagatggagcgaatgagcttgcaaatggaggaagagaatagagcaatggagcaagctcaaaaggaaatggaagaaggattgagggagttccagaataggcaagttgcaagggccgtatttgccgttcttaaagccgtagctatgattgcgcttgtattcgtcacggctggtgcgacggctcctggagctgcggcgtccgcggggcaagctgtgagcatagcaggtcaggccgcacaagctctgcgaagggtggtggaaattctagaggggctggaggctgtgatggaggttgtggctgctgtgaaggaccttgtggattcattggaacaggtaggtcagattgtgggggcaccggagatgccggacatgccctcggaggcggactggtccatttttgtgaatgagattgaggccgtggcagaggggatgccgacggaagtctcggaggttccggcatggaaggccaagtgcaagaatatggctgcactgggtagggagatgagcatcacggcagtacagatttctgagctccagtatgagatctgggtgcaaggcttgatgcgggatatagctcgaagccatgcagacaggttggctgcgattcaacctgtggaccttaccaaccatttggagatggccacacacatggatatgcggactacaagtatgctgatagggctcctcaacatgctgcgcatccagaatgcggcactcatgtacgagtaccttctaacacccacggagctcacagtatggccactgggtatggataccgtggccaacttgctcattgcgcaggagaatgctgcactggtgggattaattcagctagggcaatcgtcgaattttacgagcagacatgtggtgaaaggcatacctgtgagcttactgctcgatggtgaggattgggaattcgagatccctgtgcaagctggcatgtccagcttccctttcaactggactcgggtcaggattcggcacctggagatgcaatttgcgcaggaggcgagtggtggtggtggtggcgagattatccaccagccttccacccggtcggggattgtttacatcctcctgcagggctccactatcttccatgaccgcagaagagatgaggtgatgacctttcaggcagcggacccgctcaacttccaatatgcgtaccgcctcgacactggcgaagccactctaacgaatgagccctcggaagactttgcgaacacgttcatgcagatgacacccttcactcgctggaggcttcgtctctctgcgtccgcctcagagaatgcagaattagcgtttccaacagctacagctcccgactccactaccgaggttgtcatcacgttccatgttacggcaattagacaagttgactggcggcaagaggaggag

SEQ ID NO: 7 - protein, 852 aa, Adiantum trapeziforme
MDYSTLYRDLNQISMPLDRVEFSEVMVIHRMYLRLSDLNVGELPGAERVKRLYVLADVVELATFAHPQLLNTRMPGSVTVIILCRLLQFPTDGSFAAWLELPFMELHTLIEQYRSEIKAADDAKWGTYVHAEEVQLSPLFNGWPYLVVEAQRCIITAAMHNTFNRPGWVRSITQFTTDQSGRVDTTLLARTEFGHIDLPLETDSPTAFSVSHRQSTNLPVEYTGIPVEVVTDPNILMGMQTSVHIAELVKACYPSPELVSAVGVHVNWLNEVLLRVVQKESQLQGTEAYNECLALLGRIQCVMKMGPFVSVVPQLQYRMYGSLIRQMAQVAQNYDQDFRQLKLFIAQNQILGSYLLQQNKAFADREVQMESFHSAVISQRRQELDDAIAKMDRLSLQMEEEDRAMEQARKEMEEGLKQFQNEQVARAVFAVLKSVAMIALAFVTAGATAPGAAASAAQAVNIAGQAAQALRRVVEILEGLEAVMEVVAAIKHLVDALDQVSQIVDAPPMPDMPSEADWSIFVNEIEAVAEGMPTEVSEVPAWKAKCKNVAALGREMCITAEQISQLQYDIWVQGLLRDIAQSHADRLAAIQPANLTNYLEMAIQMDMRTTRILIGLLNIMRIQNAALMYEYLLTPTQLTAWPLRMDTVANLLITHESAALSGLAQLGPPSDFTSRHVVKGIPVSLLLDGGDWEFEIPVQGGMSSFPSSWTRVRIRHLEMHFVQEASGGGEIIHQPATQTGTIYILLQGSTVFHDRRREEVMTFQAAVPLNYHYAYRLDTGEATLTNEPSEQFANTFMQMTPFTHWRLRLSASAAENKGLAFPTATAPDSTTEIAITFHVTAIRQIDWRQEEE

SEQ ID NO: 8 - DNA, 2556 bp, Adiantum trapeziforme
atggattacagcacgctttacagggatctgaaccagataagcatgcccctggatcgggtagagttctcagaggtgatggtaatccacaggatgtacttgaggttatctgatctgaatgtgggggagctccccggagccgagagggtgaagcggttgtatgtgttggcagacgtggtggagctcgcaacatttgcgcatccacagttgcttaatacgcggatgccaggatcggtgacggtgatcattctgtgtcgtcttcttcagtttccaactgatgggtcgttcgctgcttggctcgagctgccgttcatggagttgcacacactcatagaacaatacaggtcagagataaaagcagcagatgacgcgaaatggggaacgtatgtacacgcggaggaagtacagctcagcccgctgtttaatgggtggccttatctggttgttgaggcacagcgctgtattataaccgcggccatgcacaatacatttaaccgccctgggtgggttcgctccattactcaatttacaactgatcagtccggtcgggtagataccacactgctcgcacgaacagaattcggccatattgatctaccactcgaaacagattccccaacggcattcagtgtttcacaccgccaaagtacgaatttgcccgtagagtacaccggtattccagtggaggtggtgaccgatcctaacatcttgatgggcatgcaaaccagcgtgcacattgcggagctagtgaaggcatgttacccgtcaccagaattagtgagcgctgtaggggtgcacgtgaattggctcaacgaagtcttgctccgagttgtccagaaggaatctcagttgcaagggaccgaggcctacaacgagtgccttgcgcttttaggtcgcattcaatgtgtcatgaagatggggccgtttgtctcggtagtgccgcagctgcaatacagaatgtatggtagcctcatcagacaaatggcccaggtagcacagaactacgaccaagatttcaggcagctcaagttattcattgcccaaaaccaaatccttggcagctatttgctgcagcagaacaaggcctttgctgacagagaggtgcagatggagagctttcattcagcggtcatttctcaaagaaggcaggagttggacgacgccatcgctaagatggaccgactgagcttgcagatggaggaagaggacagagcaatggagcaagcccgaaaagaaatggaagaaggattgaagcagttccagaatgagcaagttgcaagggctgtgttcgctgttcttaaatctgtagctatgattgcgctcgcattcgtcacggctggtgcaacggctcctggggctgcagcatctgcagcgcaagctgtgaacatagccggtcaagcggcacaagctctgcgaagggtggtggaaattctagaggggctcgaggctgtgatggaggttgtggctgctataaagcaccttgtggatgctctggaccaggtaagtcagattgtggatgcaccacctatgccagacatgccctcggaggcggactggagtatttttgtgaatgagattgaagccgtggcagaggggatgccgacggaagtctcggaggttccggcgtggaaggccaagtgcaagaatgtggctgcactgggtagggagatgtgcatcacggcagaacagatttcccagctccagtatgacatctgggtgcaaggcttgttgcgggatatagctcaaagccacgcagaccggctggcagcgattcaacctgctaatcttaccaactatttggagatggcaatacagatggatatgcggactacgaggatactgatagggctcctcaacataatgcgcatccagaatgcggcacttatgtatgagtaccttctaacgcccacgcagctcactgcatggccgctgagaatggatactgtggccaacttgctcatcacgcacgagagtgctgcactgtcaggattagctcagttagggcccccatcggacttcacgagcaggcatgtagtgaaaggcatacctgtgagcttgcttctagacggtggggattgggaatttgagattcctgtgcaaggtggcatgtccagtttcccttccagctggactcgagtgcggattcggcacctggagatgcactttgtgcaggaggcgagcggtggcggcgagattatccaccagcctgccacccagacggggaccatttacatcctcctgcagggctccactgtcttccatgatcgcagaagggaggaggtgatgacctttcaggcagcggttccgctcaactaccattacgcgtaccgcctcgacactggagaagccactcttacgaacgagccctcggaacagtttgccaacacattcatgcagatgacaccgttcactcactggaggctacgtctgtctgcgtccgcagcggagaataaaggattagcctttcccacagctacagctcccgactccaccactgagattgccatcactttccatgttacggccattagacaaattgactggcggcaagaggaggag

SEQ ID NO: 9 - protein, 851 aa, Adiantum trapeziforme
MDYSTLYRDLNQISIGVDRVEFSEVMVIHRMYVRLSDLNVGELPGAGRVKRVYVFADVVELAPRATLRDQMHMPGSVTVIVLCRLLQFPIDGSQATTLRLPFMQLHARVIEQNVKSEITATDGMNWGIYIYGEKVERSPLLPSNAILAVWADRCTITSARHNHVNAPGRIISTFTLGSGVTGITSMHGEPSLDPWNGVSLDSASPTAFSALPRQSRNISFTSIPVEVVTDPSILLGMQTTVLIAELVKVCRPPSPDMMSAVAEHALWLNDVLLQVVQKESQMQGTAPYNECLALLGRIECVMKIGRFVSVVPQLQYRMYGNLIKQMAQVAQNYDQEFKQFKLFIIQNQIFGSYLLQQNKAFADRELQMESFHSAVISQRRQELNTAIAKMERMSLQMEEENRAMEQAQKEMEEGLREFQNRQVARAVFAVLKAVAMIALAFVTAGATAPGAAASAGQAVSIAGQAAQALRRVVEILEGLEAVMEVVAAVKDLVDSLEQVGHIVGAPEMPDMPSEADWSIFVNEIEAVAEGMPTEVSEVPAWKAKCKNMAALGREMSITAVQISELQYEIWVQGLMRDIARSHADRLAAIQPVDLTNHLEMATHMDMRTTSMLIGLLNMLRIQNAALMYEYLLTPTELTVWPLGMDTVANLLIAQENAALVGLIQLGPSSNFTSRHVVKGIPVSLLLDGEDWEFEIPVQAGMSSFPFNWTRVRIRHLEMQFAQEASGGDEIIHQPSTRSGIVYILLQGSTIFHDRRRDEVMTFQAADPLNFQYAYRLDTGEATLTNEPSEEFANTFMQMTPFTRWRLRLSASASENAELAFPTATAPDSTTEVVITFHVTAIRQVDWRQEEE

SEQ ID NO: 10 - DNA, 2553 bp, Adiantum trapeziforme
atggattacagcacgctttacagggacctgaaccagataagcatcggtgtggaccgggtagagttctcagaggtgatggtgatccacaggatgtatgtaaggttgtctgatctgaatgtgggggagctccccggagccgggagagtgaagcgggtgtacgtgtttgcggatgtggtggagcttgcaccgcgtgcgacgctgcgggatcagatgcatatgccaggatcggtgacagtgatcgtattgtgtcgtcttcttcaatttccaatcgatgggtcgcaagctacaactctccggctgcctttcatgcagttgcatgccagagtcatagagcaaaatgtaaagtcggagataacagcaacagatggcatgaattggggaatctacatatacggggagaaagtagagaggagcccgctccttcctagcaatgcaatccttgcagtttgggcagatcgctgtactataacctcagcccgtcacaatcatgttaacgcacctgggagaataatatcgactttcacacttgggtcgggagtaacgggtataacctctatgcacggggaacccagtttggacccttggaatggtgtttctctcgactcagcttcccctacggcatttagtgctttacctcgccaaagtaggaatatatccttcacaagtattccagtagaggtggtgactgatcctagcatcttgctgggcatgcagaccaccgtgctaattgcggagctagtcaaggtatgtcgcccaccatcacccgacatgatgagtgctgtagcggagcacgcgctttggctcaatgatgtcttacttcaagttgtccagaaagaatcgcagatgcaagggactgcgccctacaacgagtgccttgcacttttgggtcgcattgaatgtgtgatgaaaatcgggagatttgtctcagtagtgcctcagctgcaatacagaatgtatggtaacctcatcaaacaaatggcccaagtagcacaaaactacgaccaagaattcaagcaattcaagttattcatcatccaaaaccaaatctttggcagctatttgcttcagcagaacaaggcatttgctgacagggagctgcagatggagagctttcattcagcggtcatttctcaaagaaggcaggagttgaatactgccatcgcaaagatggagcgaatgagcttgcaaatggaggaagagaatagagcaatggagcaagctcaaaaggaaatggaagaaggattgagggagttccagaataggcaagttgcaagggccgtatttgccgttcttaaagccgtagctatgattgcgcttgcattcgtcacggctggtgcgacggctcctggagctgcggcgtccgcggggcaagctgtgagcatagcaggtcaggccgcacaagctctgcgaagggtggtggaaattctagaggggctggaggctgtgatggaggttgtggctgctgtgaaggaccttgtggattcattggaacaggtaggtcacattgtgggggcaccggagatgccggacatgccctcggaggcggactggtccatttttgtgaatgagattgaggccgtggcagaggggatgccaacggaagtctcggaggttccggcatggaaggccaagtgcaagaatatggctgcactgggtagggagatgagcatcacggcagtacagatttctgagctccagtatgagatctgggtgcaaggcttgatgcgggatatagctcgaagccatgcagacaggttggctgcgattcaacctgtggaccttaccaaccatttggagatggccacacacatggatatgcggactacaagtatgctgatagggctcctcaatatgctgcgcatccagaatgcggcactcatgtacgagtaccttctaacacccacggagctcacagtatggccactgggtatggataccgtggccaacttgctcattgcgcaggagaatgctgcactggtgggattaattcagctagggccctcgtcgaattttacgagcagacatgtggtgaaaggcatacctgtgagcttgctgctcgatggtgaggattgggagttcgagatccctgtgcaagctggcatgtccagcttccctttcaactggactcgggtcaggattcggcacctggagatgcaatttgcgcaggaggcgagtggtggtgacgagattatccaccagccttccacccggtcggggattgtttacatcctcctgcagggctccactatcttccatgaccgcagaagagatgaggtgatgacctttcaggcagcggacccgctcaacttccaatatgcgtaccgcctcgacactggcgaagccactctaacgaatgagccctcggaagagtttgcgaacacgttcatgcagatgacacccttcactcgctggaggcttcgtctctctgcgtccgcctcagagaatgcagaattagcgtttccaacagctacagctcccgactccactaccgaggttgtcatcacgttccatgttacggcaatcagacaagttgactggcggcaagaggaggag

SEQ ID NO: 11 - protein, 851 aa, Adiantum trapeziforme
MDYSTLYRDLNQISIGVDRVEFSEVMVIHRMYVRLSDLNVGELPGAGRVKRVYVFADVVELAPRETLRDQMHMPGSVTVIILCRLLQFPIDGSQATTLRLPFMQLHARVIEQNVKSEITATDGMNWGIYIYGEKVERSPLLPSNAILAVWADRCTITSARHNHVNAPGRIISTFTLGSGVTGITSMHGEPSLDPWNGVSLDSASPTAFSALPRQSRNISFTSIPVEVVTDPSILLGMQTTVLIAELVKVCRPPSPDMMSAVAEHALWLNDVLLQVVQKESQMQGTAPYNECLALLGRIECVMKIGRFVSVVPQLQYRMYGNLIKQMAQVAQNYDQEFKQFKLFIIQNQIFGSYLLQQNKAFADRELQMESFHSAVISQRRQELNTAIAKMERMSLQMEEENRAMEQAQKEMEEGLREFQNRQVARAVFAVLKAVAMIALAFVTAGATAPGAAASAGQAVSIAGQAAQALRRVVEILEGLEAVMEVVAAVKDLVDSLEQVGHIVGAPEMPDMPSEADWSIFVNEIEAVAEGMPTEVSEVPAWKAKCKNMAALGREMSITAVQISELQYEIWVQGLMRDIARSHADRLAAIQPVDLTNHLEMATHMDMRTTSMLIGLLNMLRIQNAALMYEYLLTPTELTVWPLGMDTVANLLIAQENAALVGLIQLGPSSNFTSRHVVKGIPVSLLLDGEDWEFEIPVQAGMSSFPFNWTRVRIRHLEMQFAQEASGGDEIIHQPSTRSGIVYILLQGSTIFHDRRRDEVMTFQAADPLNFQYAYRLDTGEATLTNEPSEEFANTFMQMTPFTRWRLRLSASASENAELAFPTATAPDSTTEVVITFHVTAIRQVDWRQEEE

SEQ ID NO: 12 - DNA, 2553 bp, Adiantum trapeziforme
atggattacagcacgctttacagggacctgaaccagataagcatcggtgtggaccgggtagagttctcagaggtgatggtgatccacaggatgtatgtaaggttgtctgatctgaatgtgggggagctccccggagccgggagagtgaagcgggtgtacgtgtttgcggatgtggtggagcttgcaccgcgcgagacgctgcgggaccagatgcatatgccaggatcggtgacagtgatcatattgtgtcggcttcttcaatttccaatcgatgggtcgcaagctacaactctccggctgcctttcatgcagttgcatgccagagtcatagagcaaaatgtaaagtcggagataacagcaacagatggcatgaattggggaatctacatatacggggagaaagtagagaggagcccgctccttcctagcaatgcaatccttgcagtttgggcagatcgctgtactataacctcagcccgtcacaatcatgttaacgcacctgggagaataatatcgactttcacacttgggtcgggagtaacgggtataacctctatgcacggggaacccagtttggacccttggaatggtgtttctctcgactcagcttcccctacggcatttagtgctttacctcgccaaagtaggaatatatccttcacaagtattccagtagaggtggtgactgatcctagcatcttgctgggcatgcagaccaccgtgctaattgcggagctagtcaaggtatgtcgcccaccatcacccgacatgatgagtgctgtagcggagcacgcgctttggctcaatgatgtcttacttcaagttgtccagaaagaatcgcagatgcaagggactgcgccctacaacgagtgccttgcacttttgggtcgcattgaatgtgtgatgaaaatcgggagatttgtctcagtagtgcctcagctgcaatacagaatgtatggtaacctcatcaaacaaatggcccaagtagcacaaaactacgaccaagaattcaagcaattcaagttattcatcatccaaaaccaaatctttggcagctatttgcttcagcagaacaaggcatttgctgacagggagctgcagatggagagctttcattcagcggtcatttctcaaagaaggcaggagttgaatactgccatcgcaaagatggagcgaatgagcttgcaaatggaggaagagaatagagcaatggagcaagctcaaaaggaaatggaagaaggattgagggagttccagaataggcaagttgcaagggccgtatttgccgttcttaaagccgtagctatgattgcgcttgcattcgtcacggctggtgcgacggctcctggagctgcggcgtccgcggggcaagctgtgagcatagcaggtcaggccgcacaagctctgcgaagggtggtggaaattctagaggggctggaggctgtgatggaggttgtggctgctgtgaaggaccttgtggattcattggaacaggtaggtcacattgtgggggcaccggagatgccggacatgccctcggaggcggactggtccatttttgtgaatgagattgaggccgtggcagaggggatgccaacggaagtctcggaggttccggcatggaaggccaagtgcaagaatatggctgcactgggtagggagatgagcatcacggcagtacagatttctgagctccagtatgagatctgggtgcaaggcttgatgcgggatatagctcgaagccatgcagacaggttggctgcgattcaacctgtggaccttaccaaccatttggagatggccacacacatggatatgcggactacaagtatgctgatagggctcctcaatatgctgcgcatccagaatgcggcactcatgtacgagtaccttctaacacccacggagctcacagtatggccactgggtatggataccgtggccaacttgctcattgcgcaggagaatgctgcactggtgggattaattcagctagggccctcgtcgaattttacgagcagacatgtggtgaaaggcatacctgtgagcttgctgctcgatggtgaggattgggagttcgagatccctgtgcaagctggcatgtccagcttccctttcaactggactcgggtcaggattcggcacctggagatgcaatttgcgcaggaggcgagtggtggtgacgagattatccaccagccttccacccggtcggggattgtttacatcctcctgcagggctccactatcttccatgaccgcagaagagatgaggtgatgacctttcaggcagcggacccgctcaacttccaatatgcgtaccgcctcgacactggcgaagccactctaacgaatgagccctcggaagagtttgcgaacacgttcatgcagatgacacccttcactcgctggaggcttcgtctctctgcgtccgcctcagagaatgcagaattagcgtttccaacagctacagctcccgactccactaccgaggttgtcatcacgttccatgttacggcaatcagacaagttgactggcggcaagaggaggag

SEQ ID NO: 13 - protein, 854 aa, Adiantum peruvianum
MDYSTLYRDLNQISIGVDRVEFSEVMVIHRMYVRLSDLNVGELPGAGRVKRVYVFADVVELAPRATLRDQMHMPGSVTVIVLCRLLQFPIDGSQATTLRLPFMQLHARVIEQNVKSEITATDGMNWGIYIYGEKVERSPLLPSNAILAVWADRCTITSARHNHVNAPGRIISTFTLGSGVTGITSMHGEPSLDPWNGVSLDSASPTAFSALPRQSRNISFTSIPVEVVTDPSILLGMQTTVLIAELVKVCRPPSPDMMSAVAEHALWLNDVLLQVVQKESQMQGTAPYNECLALLGRIECVMKIGRFVSVVPQLQYRMYGNLIKQMAQVAQNYDQEFKQFKLFIIQNQIFGSYLLQQNKAFADRELQMESFHSAVISQRRQELNTAIAKMERMSLQMEEENRAMEQAQKEMEEGLREFQNRQVARAVFAVLKAVAMIALAFVTAGATAPGAAASAGQAVSIAGQAAQALRRVVEILEGLEAVMEVVAAVKDLVDSLEQVGHIVGAPEMPDMPSEADWSIFVNEIEAVAEGMPTEVSEVPAWKAKCKNMAALGREMSITAVQISELQYEIWVQGLMRDIARSHADRLAAIQPVDLTNHLEMATHMDMRTTSMLIGLLNMLRIQNAALMYEYLLTPTELTVWPLGMDTVANLLIAQENAALVGLIQLGPSSNFTSRHVVKGIPVSLLLDGEDWEFEIPVQAGMSSFPFNWTRVRIRHLEMQFAQEASGGDEIIHQPSTRSGIVYILLQGSTIFHDRRRDEVMTFQAADPLNFQYAYRLDTGEATLTNEPSEEFANTFMQMTPFTRWRLRLSASASENAELAFPTATAPDSTTEVVITFHVTAIRQVDWRQEEKEEE

SEQ ID NO: 14 - DNA, 2562 bp, Adiantum peruvianum
atggattacagcacgctttacagggacctgaaccagataagcatcggtgtggaccgggtagagttctcagaggtgatggtgatccacaggatgtatgtaaggttgtctgatctgaatgtgggggagctccccggagccgggagagtgaagcgggtgtacgtgtttgcggatgtggtggagcttgcaccgcgtgcgacgctgcgggatcagatgcatatgccaggatcggtgacagtgatcgtattgtgtcgtcttcttcaatttccaatcgatgggtcgcaagctacaactctccggctgcctttcatgcagttgcatgccagagtcatagagcaaaatgtaaagtcggagataacagcaacagatggcatgaattggggaatctacatatacggggagaaagtagagaggagcccgctccttcctagcaatgcaatccttgcagtttgggcagatcgctgtactataacctcagcccgtcacaatcatgttaacgcacctgggagaataatatcgactttcacacttgggtcgggagtaacgggtataacctctatgcacggggaacccagtttggacccttggaatggtgtttctctcgactcagcttcccctacggcatttagtgctttacctcgccaaagtaggaatatatccttcacaagtattccagtagaggtggtgactgatcctagcatcttgctgggcatgcagaccaccgtgctaattgcggagctagtcaaggtatgtcgcccaccatcacccgacatgatgagtgctgtagcggagcacgcgctttggctcaatgatgtcttacttcaagttgtccagaaagaatcgcagatgcaagggactgcgccctacaacgagtgccttgcacttttgggtcgcattgaatgtgtgatgaaaatcgggagatttgtctcagtagtgcctcagctgcaatacagaatgtatggtaacctcatcaaacaaatggcccaagtagcacaaaactacgaccaagaattcaagcaattcaagttattcatcatccaaaaccaaatctttggcagctatttgcttcagcagaacaaggcatttgctgacagggagctgcagatggagagctttcattcagcggtcatttctcaaagaaggcaggagttgaatactgccatcgcaaagatggagcgaatgagcttgcaaatggaggaagagaatagagcaatggagcaagctcaaaaggaaatggaagaaggattgagggagttccagaataggcaagttgcaagggccgtatttgccgttcttaaagccgtagctatgattgcgcttgcattcgtcacggctggtgcgacggctcctggagctgcggcgtccgcggggcaagctgtgagcatagcaggtcaggccgcacaagctctgcgaagggtggtggaaattctagaggggctggaggctgtgatggaggttgtggctgctgtgaaggaccttgtggattcattggaacaggtaggtcacattgtgggggcaccggagatgccggacatgccctcggaggcggactggtccatttttgtgaatgagattgaggccgtggcagaggggatgccaacggaagtctcggaggttccggcatggaaggccaagtgcaagaatatggctgcactgggtagggagatgagcatcacggcagtacagatttctgagctccagtatgagatctgggtgcaaggcttgatgcgggatatagctcgaagccatgcagacaggttggctgcgattcaacctgtggaccttaccaaccatttggagatggccacacacatggatatgcggactacaagtatgctgatagggctcctcaatatgctgcgcatccagaatgcggcactcatgtacgagtaccttctaacacccacggagctcacagtatggccactgggtatggataccgtggccaacttgctcattgcgcaggagaatgctgcactggtgggattaattcagctagggccctcgtcgaattttacgagcagacatgtggtgaaaggcatacctgtgagcttgctgctcgatggtgaggattgggagttcgagatccctgtgcaagctggcatgtccagcttccctttcaactggactcgggtcaggattcggcacctggagatgcaatttgcgcaggaggcgagtggtggtgacgagattatccaccagccttccacccggtcggggattgtttacatcctcctgcagggctccactatcttccatgaccgcagaagagatgaggtgatgacctttcaggcagcggacccgctcaacttccaatatgcgtaccgcctcgacactggcgaagccactctaacgaatgagccctcggaagagtttgcgaacacgttcatgcagatgacacccttcactcgctggaggcttcgtctctctgcgtccgcctcagagaatgcagaattagcgtttccaacagctacagctcccgactccactaccgaggttgtcatcacgttccatgttacggcaatcagacaagttgactggcggcaggaggagaaagaggaggag

SEQ ID NO: 15 - protein, 852 aa, Lygodium flexuosum
MASVLDYSTLYRDLNQISMAVDQVEFSEVMVIHRMYVNLADLDVAELVGAETVKRVYVFADVVELAPGKRTQLPGSVTVIILCRLLQFPTGGSRAATLQLPFMKVHATLIERFRSEIAAADGMNWGTYIHGEEVQVSPLYPNNSILGVWADRSIITSAFHNVFDEPGRVISSTSITRAQSAPNNTTMSAEPGWLSGNRFLLYTVSRSAFSVLPSQSTNVSFTSIPVEVVTDPNILLGMQTTVHIAELVKAGHPSPDIVSAVAEHAIWLSKVLLQVVQNESHLQGTESYNECLALLGRVQSVIKMGRFGLVVPQLQYRMYGSLIKQMAQVAQNYDQDFKRFRLFILQNQILGSYLLEQNKAFADRELQMESFHSAVISQRKGELDTAFAKMDRLSLQMEEENGAMEQAQKEMDEGLRQFQNRQVARALFAVLRAVAQIGLAFVTAGATAPGAVASAGQAVSIAGQAAQGLRRVVEILEQLEAVMEVVAAVKDLVNSLEQVGQLVQAPVMPDMPSEADWSIFVNEVEAVAEGMPTEVSEVPAWKAKCKNVAALGREMSITAVQISELQYDIWVQGMMRDIAQSQADRLAAIQPADLTNFLEMATQMDMRTTRMLIGLLNMLRIQNAALMYEYLLTPTELTAWPLGMDTVGNLLIAQENAALLGLTQLGPSSDFTSRHVVKGIPVSLLLDGEDWEFEIPVQGGMSSFPSSWTRVRIRHLEMHFVQESMNGGGEIIHQPATQTGTVYILLQGSTIFHDRRRDEVMTFQAAAPLNYQYAYRLDTGETTLTNQPSEHFANTFMQMTPFTRWRLRLSASAPENAGLAFPTATALDSTTQIVITFHVTAIRQIDWRHEEE

SEQ ID NO: 16 - DNA, 2556 bp, Lygodium flexuosum
atggccagtgtactggattacagcacgctttacagggatctgaaccagataagcatggctgtggatcaggtagagttctcagaggtgatggtgatccacaggatgtatgtgaatttagctgacctggatgtggcggagctcgtgggagctgagacagtgaagcgggtgtatgtgtttgcggatgtggtggagcttgcaccggggaaacggacgcaattgccaggatcggtgacggtgatcatattgtgtcgtcttcttcaatttccaactggtgggtcgcgagcagcaactctccagctgcctttcatgaaggtccatgctacactcatagagcgatttaggtcagagatagcagcagcagatgggatgaactggggaacgtacatacacggggaggaagtacaggtcagcccgctgtatcctaacaattcaatacttggagtttgggcagatcgctctattataacctcagcctttcacaatgtgttcgacgaacctgggagagtaatttccagtactagtattacaagggcacagtcagcacccaacaacacgactatgtcagcagaacccggctggctctctggcaatcgttttctactttacacggtttcccggtcggcattcagtgttttacctagccaaagtacgaatgtatccttcacaagtattccggtagaggtggtgactgatccgaacatcttgctgggcatgcagacaacagtgcacattgcggagctagtcaaggcaggtcacccgtcacccgacattgtgagcgcggtagcggagcacgcgatttggctcagcaaagtcttgctccaagttgtgcagaacgaatctcacttgcaagggaccgagtcctacaacgagtgcctggcacttttgggccgtgttcaatctgtgatcaagatggggagatttggcttagtagtgccccagctgcaatacagaatgtacggtagcctcatcaaacaaatggcccaagtagcacagaactacgaccaagatttcaagcgattccggttattcattcttcaaaatcaaatccttggcagctatttgctggagcagaacaaggcatttgctgacagggagctgcagatggagagcttccattcagccgtgatttctcaaagaaaaggcgagctggacactgccttcgcaaagatggaccgactgagcttgcaaatggaggaagagaatggcgcaatggagcaagcccaaaaggaaatggacgaaggattaaggcagttccagaataggcaagttgcaagggccctctttgccgttcttagagctgtagctcagattgggcttgcattcgtcacggctggtgcaacggctcctggagctgtggcgtccgcggggcaagccgtgagcatagcaggtcaggccgcgcaaggtctgcgaagggtggtggaaatcctagagcagctggaagctgtgatggaggttgtggctgctgtgaaggaccttgtgaattcattggaacaggtaggtcagttggtgcaggcaccggtgatgccggacatgccctcggaagcggactggtccatttttgtgaatgaggtcgaggccgtggcagaggggatgccgacggaagtctcggaggttccagcgtggaaggccaagtgcaagaatgtggctgcactgggtcgggagatgagcatcaccgcagtacaaatttctgagctccagtatgacatctgggtgcaaggcatgatgcgggatattgctcaaagccaggcagacaggctggcggcgattcaacccgcggaccttaccaactttttggagatggcaacacagatggatatgcggactacaaggatgctgatagggctcctcaacatgctccgcatccagaatgcggcactcatgtacgagtaccttcttacgcccacggagctcacagcatggccgctgggtatggataccgtgggcaacttgctcattgcgcaggagaatgctgcactattaggattaactcagctaggaccctcatccgatttcacgagcaggcatgtggtgaaaggcatacctgtgagcttgctactcgatggtgaggattgggagttcgagatccctgtgcaaggtggcatgtccagcttcccttcaagctggactcgcgtccggattcggcacttggagatgcactttgtgcaagagtcgatgaacggtggcggcgagattattcaccagcctgccacccagactgggaccgtttacatcctcctgcagggctccactatcttccatgaccgcagaagagacgaggtgatgacctttcaggcagcggctccgctcaactaccagtacgcgtaccgcctcgacactggtgaaaccactcttacgaaccagccctcggaacactttgccaacacgttcatgcagatgacacccttcactcgctggaggcttcgtctctctgcgtccgccccagagaatgcaggattagcctttcccacagctacagctctcgactccactacccagattgtcatcactttccatgttacggccattagacaaattgactggcggcacgaggaggag

SEQ ID NO: 17 - protein, 852 aa, Adiantum peruvianum
MDYSTLYRDLNQISMPLDRVEFSEVMVIHRMYLRLSDLNVGELPGAERVKRLYVFADVVELATFAYPQLLHTRMPGSVTVIILCRLLQFPTDGSFAAWLELPFMELHTLIEQYRSEIKAADDAKWGTYVHAEEVQLSPLFNGWPYLVVEAQRCIITAAMHNTFNRPGWVRSVTQFTTDQSGRVDTTLLARTEFGHIYLPLETDSPTAFSVSHRQSTNLPVEYTGIPVEVVTDPNILMGMQTSVHIAELVKACYPSPELVSAVGVHVNWLNEVLLRVVQKESQLQGTEAYNECLALLGRIQCVMKMGPFVSVVPQLQYRMYGSLIRQMAQVAQNYDQDFRQLKLFIAQNQILGSYLLQQNKAFADREVQMESFHSAVISQRRQELDDALAKMDRLSLQMEEEDRAMEQARKEMEEGLKQFQNEQVARAVFAVLKSVAMIALAFVTAGATAPGAAASAAQAVNIAGQAAQALRRVVEILEGLEAVMEVVAAIKHLVDALDQVSQIVDAPPMPDMPSEADWSIFVNEIEAVAEGMPTEVSEVPAWKAKCKNVAALGREMCITAEQISQLQYDIWVQGLLRDIAQTHADRLAAIQPANLTNYLEMATQMDMRTTRILIGLLNIMRIQNAALMYEYLLTPTQLTAWPLRMDTVANLLITQESAALSGLAQLGPPSDFTSRHVVKGIPVSLLLDGGDWEFEIPVQGGMSSFPSSWTRVRIRHLEMHFVQEASGGGEIIHQPATQTGTVYILLQGSTVFHDRRREEVMTFQAAVPLNYHYAYRLDTGEATLTNEPSEQFANTFMQMTPFTHWRLRLSASAAENEGLAFPTATAPDSTTEIAITFHVMAIRQIDWRQEEE

SEQ ID NO: 18 - DNA, 2556 bp, Adiantum peruvianum
atggattacagcactctttacagggatctgaaccagataagcatgcccctggatcgggtagagttctcagaggtgatggtaatccacaggatgtacttgaggttatctgatctgaatgtgggggagctccccggagccgagagggtgaagcggttgtatgtgtttgcagacgtggtggagctcgcgacatttgcgtatccacagttgcttcatacgcggatgccaggatcggtgacggtgatcattctgtgtcgtcttcttcagtttccaactgatgggtcgttcgctgcttggctcgagctgccgttcatggagttgcacacactcatagaacaatacaggtcagagataaaagcagcagatgacgcgaaatggggaacgtatgtacacgcggaggaagtacagctcagcccgctgtttaatgggtggccttatctggttgttgaggcacagcgctgtattataaccgcggccatgcacaatacatttaaccgccctgggtgggttcgctccgttactcaatttacaactgatcagtccggtcgggtagataccacactgctcgcacgaacagaattcggccatatttatctaccactcgagacagattccccaacggcattcagtgtttcacaccgccaaagtacgaatttgcccgtagagtacaccggtattccagtagaggtggtgaccgatcctaacatcttgatgggcatgcaaaccagcgtgcacattgcggagctagtgaaggcatgttacccgtcaccagaattagtgagcgctgtaggggtgcacgtgaattggctcaacgaagtcttgctccgagttgtccagaaggaatctcagttgcaagggaccgaggcctacaacgagtgccttgcgcttttgggtcgcattcaatgtgtcatgaagatggggccgtttgtctcggtagtgccgcagctgcaatacagaatgtatggtagcctcatcagacaaatggcccaggtagcacagaactacgaccaagatttcaggcagctcaagttattcattgcccaaaaccaaatccttggcagctatttgctgcagcagaacaaggcatttgctgacagagaggtgcagatggagagctttcattcagcggtcatttctcaaagaaggcaggagttggacgacgccctcgctaagatggaccgactgagcttgcagatggaggaagaggacagagcaatggagcaagcccgaaaagaaatggaagaaggattgaagcagttccagaatgagcaagttgcaagggctgtgttcgctgttcttaaatctgtagctatgattgcgctcgcattcgtcacggctggtgcaacggctcctggggctgcagcatccgcagcgcaagctgtgaacatagccggtcaagcggcacaagctctgcgaagggtggtggaaattctagaggggctcgaggctgtgatggaggttgtggctgctataaagcaccttgtggatgctctggaccaggtaagtcagattgtggatgcaccacctatgccagacatgccctcggaggcagactggagtatttttgtgaatgagattgaagccgtggcagaggggatgccgacggaagtctcggaggttccggcgtggaaggccaagtgcaagaatgtggctgcactgggtagggagatgtgcatcacggcagaacagatttcccagctccagtatgacatctgggtgcaaggcttgttgcgggatatagctcaaacccacgcagaccggctggcagcgattcaacctgctaatcttaccaactatttggagatggcaacacagatggatatgcggactacgaggatattgatagggctcctcaacataatgcgcatccagaatgcggcacttatgtatgagtaccttctaacgcccacgcagctcactgcatggccgctgagaatggatactgtggccaacttgctcatcacgcaggagagtgctgcactgtcaggattagctcagttagggcccccatcggacttcacgagcaggcatgtggtgaaaggcatacctgtgagcttgcttctagacggtggggattgggaatttgagattcctgtgcaaggtggcatgtccagtttcccttccagctggactcgagtgcggattcggcacctggagatgcactttgtgcaggaggcgagcggtggcggcgagattatccaccagcctgccacccagacggggaccgtttacatcctcctgcagggctccactgtcttccatgatcgcagaagggaggaggtgatgacctttcaggcagcggttccgctcaactaccattacgcgtaccgcctcgacactggagaagccactcttacgaacgagccctcggaacagtttgccaacacattcatgcagatgacaccgttcactcactggaggctacgtctgtctgcgtccgcagcggagaatgaaggattagcctttcccacagctacagctcccgactccaccactgagattgccatcactttccatgttatggccattagacaaatcgactggcggcaagaggaggag

SEQ ID NO: 19 - protein, 782 aa, Adiantum peruvianum
MDYSTLYRDLNQISIGVDRVEFSEVMVIHRMYVRLSDLNVGELPGAGRVKRVYVFADVVELAPRATLRDQMHMPGSVTVIVLCRLLQFPIDGSQATTLRLPFMQLHARVIEQNVKSEITATDGMNWGIYIYGEKVERSPLLPSNAILAVWADRCTITSARHNHVNAPGRIISTFTLGSGVTGITSMHGEPSLDPWNGVSLDSASPTAFSALPRQSRNISFTSIPVEVVTDPSILLGMQTTVLIAELVKVCRPPSPDMMSAVAEHALWLNDVLLQVVQKESQMQGTAPYNECLALLGRIECVMKIGRFVSVVPQLQYRMYGNLIKQMAQVAQNYDQEFKQFKLFIIQNQIFGSYLLQQNKAFADRELQMESFHSAVISQRRQELNTAIAKMERMSLQMEEENRAMEQAQKEMEEGLREFQNRQVARAVFAVLKAVAMIALAFVTAGATAPGAAASAGQAVSIAGQAAQALRRVVEILEGLEAVMEVVAAVKDLVDSLEQVGHIVGAPEMPDMPSEADWSIFVNEIEAVAEGMPTEVSEVPAWKAKCKNMAALGREMSITAVQISELQYEIWVQGLMRDIARSHADRLAAIQPVDLTNHLEMATHMDMRTTSMLIGLLNMLRIQNAALMYEYLLTPTELTVWPLGMDTVANLLIAQENAALVGLIQLGPSSNFTSRHVVKGIPVSLLLDGEDWEFEIPVQAGMSSFPFNWTRVRIRHLEMQFAQEASGGDEIIHQPSTRSGIVYILLQGSTIFHDRRRDEVMTFQAADPLNFQMRTASTLAKPL

SEQ ID NO: 20 - DNA, 2346 bp, Adiantum peruvianum
atggattacagcacgctttacagggacctgaaccagataagcatcggtgtggaccgggtagagttctcagaggtgatggtgatccacaggatgtatgtaaggttgtctgatctgaatgtgggggagctccccggagccgggagagtgaagcgggtgtacgtgtttgcggatgtggtggagcttgcaccgcgtgcgacgctgcgggatcagatgcatatgccaggatcggtgacagtgatcgtattgtgtcgtcttcttcaatttccaatcgatgggtcgcaagctacaactctccggctgcctttcatgcagttgcatgccagagtcatagagcaaaatgtaaagtcggagataacagcaacagatggcatgaattggggaatctacatatacggggagaaagtagagaggagcccgctccttcctagcaatgcaatccttgcagtttgggcagatcgctgtactataacctcagcccgtcacaatcatgttaacgcacctgggagaataatatcgactttcacacttgggtcgggagtaacgggtataacctctatgcacggggaacccagtttggacccttggaatggtgtttctctcgactcagcttcccctacggcatttagtgctttacctcgccaaagtaggaatatatccttcacaagtattccagtagaggtggtgactgatcctagcatcttgctgggcatgcagaccaccgtgctaattgcggagctagtcaaggtatgtcgcccaccatcacccgacatgatgagtgctgtagcggagcacgcgctttggctcaatgatgtcttacttcaagttgtccagaaagaatcgcagatgcaagggactgcgccctacaacgagtgccttgcacttttgggtcgcattgaatgtgtgatgaaaatcgggagatttgtctcagtagtgcctcagctgcaatacagaatgtatggtaacctcatcaaacaaatggcccaagtagcacaaaactacgaccaagaattcaagcaattcaagttattcatcatccaaaaccaaatctttggcagctatttgcttcagcagaacaaggcatttgctgacagggagctgcagatggagagctttcattcagcggtcatttctcaaagaaggcaggagttgaatactgccatcgcaaagatggagcgaatgagcttgcaaatggaggaagagaatagagcaatggagcaagctcaaaaggaaatggaagaaggattgagggagttccagaataggcaagttgcaagggccgtatttgccgttcttaaagccgtagctatgattgcgcttgcattcgtcacggctggtgcgacggctcctggagctgcggcgtccgcggggcaagctgtgagcatagcaggtcaggccgcacaagctctgcgaagggtggtggaaattctagaggggctggaggctgtgatggaggttgtggctgctgtgaaggaccttgtggattcattggaacaggtaggtcacattgtgggggcaccggagatgccggacatgccctcggaggcggactggtccatttttgtgaatgagattgaggccgtggcagaggggatgccaacggaagtctcggaggttccggcatggaaggccaagtgcaagaatatggctgcactgggtagggagatgagcatcacggcagtacagatttctgagctccagtatgagatctgggtgcaaggcttgatgcgggatatagctcgaagccatgcagacaggttggctgcgattcaacctgtggaccttaccaaccatttggagatggccacacacatggatatgcggactacaagtatgctgatagggctcctcaatatgctgcgcatccagaatgcggcactcatgtacgagtaccttctaacacccacggagctcacagtatggccactgggtatggataccgtggccaacttgctcattgcgcaggagaatgctgcactggtgggattaattcagctagggccctcgtcgaattttacgagcagacatgtggtgaaaggcatacctgtgagcttgctgctcgatggtgaggattgggagttcgagatccctgtgcaagctggcatgtccagcttccctttcaactggactcgggtcaggattcggcacctggagatgcaatttgcgcaggaggcgagtggtggtgacgagattatccaccagccttccacccggtcggggattgtttacatcctcctgcagggctccactatcttccatgaccgcagaagagatgaggtgatgacctttcaggcagcggacccgctcaacttccaaatgcgtaccgcctcgacactggcgaagccactc

SEQ ID NO: 21 - protein, 623 aa, Adiantum trapeziforme
MDYSTLYRDLNQISIGVDRVEFSPDMMSAVAEHALWLNDVLLQVVQKESQMQGTAPYNECLALLGRIECVMKIGRFVSVVPQLQYRMYGNLIKQMAQVAQNYDQEFKQFKLFIIQNQIFGSYLLQQNKAFADRELQMESFHSAVISQRRQELNTAIAKMERMSLQMEEENRAMEQAQKEMEEGLREFQNRQVARAVFAVLKAVAMIALAFVTAGATAPGAAASAGQAVSIAGQAAQALRRVVEILEGLEAVMEVVAAVKDLVDSLEQVGHIVGAPEMPDMPSEADWSIFVNEIEAVAEGMPTEVSEVPAWKAKCKNMAALGREMSITAVQISELQYEIWVQGLMRDIARSHADRLAAIQPVDLTNHLEMATHMDMRTTSMLIGLLNMLRIQNAALMYEYLLTPTELTVWPLGMDTVANLLIAQENAALVGLIQLGPSSNFTSRHVVKGIPVSLLLDGEDWEFEIPVQAGMSSFPFNWTRVRIRHLEMQFAQEASGGDEIIHQPSTRSGIVYILLQGSTIFHDRRRDEVMTFQAADPLNFQYAYRLDTGEATLTNEPSEEFANTFMQMTPFTRWRLRLSASASENAELAFPTATAPDSTTEVVITFHVTAIRQVDWRQEEKEEE

SEQ ID NO: 22 - DNA, 1869 bp, Adiantum trapeziforme
atggattacagcacgctttacagggacctgaaccagataagcatcggtgtggaccgggtagagttctcacccgacatgatgagtgctgtagcggagcacgcgctttggctcaatgatgtcttacttcaagttgtccagaaagaatcgcagatgcaagggactgcgccctacaacgagtgccttgcacttttgggtcgcattgaatgtgtgatgaaaatcgggagatttgtctcagtagtgcctcagctgcaatacagaatgtatggtaacctcatcaaacaaatggcccaagtagcacaaaactacgaccaagaattcaagcaattcaagttattcatcatccaaaaccaaatctttggcagctatttgcttcagcagaacaaggcatttgctgacagggagctgcagatggagagctttcattcagcggtcatttctcaaagaaggcaggagttgaatactgccatcgcaaagatggagcgaatgagcttgcaaatggaggaagagaatagagcaatggagcaagctcaaaaggaaatggaagaaggattgagggagttccagaataggcaagttgcaagggccgtatttgccgttcttaaagccgtagctatgattgcgcttgcattcgtcacggctggtgcgacggctcctggagctgcggcgtccgcggggcaagctgtgagcatagcaggtcaggccgcacaagctctgcgaagggtggtggaaattctagaggggctggaggctgtgatggaggttgtggctgctgtgaaggaccttgtggattcattggaacaggtaggtcacattgtgggggcaccggagatgccggacatgccctcggaggcggactggtccatttttgtgaatgagattgaggccgtggcagaggggatgccaacggaagtctcggaggttccggcatggaaggccaagtgcaagaatatggctgcactgggtagagagatgagcatcacggcagtacagatttctgagctccagtatgagatctgggtgcaaggcttgatgcgggatatagctcgaagccatgcagacaggttggctgcgattcaacctgtggaccttaccaaccatttggagatggccacacacatggatatgcggactacaagtatgctgatagggctcctcaatatgctgcgcatccagaatgcggcactcatgtacgagtaccttctaacacccacggagctcacagtatggccactgggtatggataccgtggccaacttgctcattgcgcaggagaatgctgcactggtgggattaattcagctagggccctcgtcgaattttacgagcagacatgtggtgaaaggcatacctgtgagcttgctgctcgatggtgaggattgggagttcgagatccctgtgcaagctggcatgtccagcttccctttcaactggactcgggtcaggattcggcacctggagatgcaatttgcgcaggaggcgagtggtggtgacgagattatccaccagccttccacccggtcggggattgtttacatcctcctgcagggctccactatcttccatgaccgcagaagagatgaggtgatgacctttcaggcagcggacccgctcaacttccaatatgcgtaccgcctcgacactggcgaagccactctaacgaatgagccctcggaagagtttgcgaacacgttcatgcagatgacacccttcactcgctggaggcttcgtctctctgcgtccgcctcagagaatgcagaattagcgtttccaacagctacagctcccgactccactaccgaggttgtcatcacgttccatgttacggcaatcagacaagttgactggcggcaggaggagaaagaggaggag

SEQ ID NO: 23 - protein, 691 aa, Adiantum trapeziforme
MDYSTLYRDLNQISIGVDRVEFSEVMVIHRMYVRLSDLNVGELPGAGRVKRVYVFADVVELAPRATLRDQMHMPGSVTVIVLCRLLQFPIDGSQATTLRLPFMQLHARVIEQNVKSEITATDGMNWGIYIYGEKVERSPLLPSNAILAVWADRCTITSARHNHVNAPGRIISTFTLGSGVTGITSMHGEPSLDPWNGVSLDSASPTAFSALPRQSRNISFTSIPVEVVTDPSILLGMQTTVLIAELVKVCRPPSPDMMSAVAEHALWLNDVLLQVVQKESQMQGTAPYNECLALLGRIECVMKIGRFVSVVPQLQYRMYGNLIKQMAQVAQNYDQEFKQFKLFIIQNQIFGSYLLQQNKAFADRELQMESFHSAVISQRRQELNTAIAKMERMSLQMEEENRAMEQAQKEMEEGLREFQNRQVARAVFAVLKAVAMIALAFVTAGATAPGAAASAGQAVSIALMYEYLLTPTELTVWPLGMDTVANLLIAQENAALVGLIQLGPSSNFTSRHVVKGIPVSLLLDGEDWEFEIPVQAGMSSFPFNWTRVRIRHLEMQFAQEASGGDEIIHQPSTRSGIVYILLQGSTIFHDRRRDEVMTFQAADPLNFQYAYRLDTGEATLTNEPSEEFANTFMQMTPFTRWRLRLSASASENAELAFPTATAPDSTTEVVITFHVTAIRQVDWRQEEKEEE

SEQ ID NO: 24 - DNA, 2073 bp, Adiantum trapeziforme
atggattacagcacgctttacagggacctgaaccagataagcatcggtgtggaccgggtagagttctcagaggtgatggtgatccacaggatgtatgtaaggttgtctgatctgaatgtgggggagctccccggagccgggagagtgaagcgggtgtacgtgtttgcggatgtggtggagcttgcaccgcgtgcgacgctgcgggatcagatgcatatgccaggatcggtgacagtgatcgtattgtgtcgtcttcttcaatttccaatcgatgggtcgcaagctacaactctccggctgcctttcatgcagttgcatgccagagtcatagagcaaaatgtaaagtcggagataacagcaacagatggcatgaattggggaatctacatatacggggagaaagtagagaggagcccgctccttcctagcaatgcaatccttgcagtttgggcagatcgctgtactataacctcagcccgtcacaatcatgttaacgcacctgggagaataatatcgactttcacacttgggtcgggagtaacgggtataacctctatgcacggggaacccagtttggacccttggaatggtgtttctctcgactcagcttcccctacggcatttagtgctttacctcgccaaagtaggaatatatccttcacaagtattccagtagaggtggtgactgatcctagcatcttgctgggcatgcagaccaccgtgctaattgcggagctagtcaaggtatgtcgcccaccatcacccgacatgatgagtgctgtagcggagcacgcgctttggctcaatgatgtcttacttcaagttgtccagaaagaatcgcagatgcaagggactgcgccctacaacgagtgccttgcacttttgggtcgcattgaatgtgtgatgaaaatcgggagatttgtctcagtagtgcctcagctgcaatacagaatgtatggtaacctcatcaaacaaatggcccaagtagcacaaaactacgaccaagaattcaagcaattcaagttattcatcatccaaaaccaaatctttggcagctatttgcttcagcagaacaaggcatttgctgacagggagctgcagatggagagctttcattcagcggtcatttctcaaagaaggcaggagttgaatactgccatcgcaaagatggagcgaatgagcttgcaaatggaggaagagaatagagcaatggagcaagctcaaaaggaaatggaagaaggattgagggagttccagaataggcaagttgcaagggccgtatttgccgttcttaaagccgtagctatgattgcgcttgcattcgtcacggctggtgcgacggctcctggagctgcggcgtccgcggggcaagctgtgagcatagcactcatgtacgagtaccttctaacacccacggagctcacagtatggccactgggtatggataccgtggccaacttgctcattgcgcaggagaatgctgcactggtgggattaattcagctagggccctcgtcgaattttacgagcagacatgtggtgaaaggcatacctgtgagcttgctgctcgatggtgaggattgggagttcgagatccctgtgcaagctggcatgtccagcttccctttcaactggactcgggtcaggattcggcacctggagatgcaatttgcgcaggaggcgagtggtggtgacgagattatccaccagccttccacccggtcggggattgtttacatcctcctgcagggctccactatcttccatgaccgcagaagagatgaggtgatgacctttcaggcagcggacccgctcaacttccaatatgcgtaccgcctcgacactggcgaagccactctaacgaatgagccctcggaagagtttgcgaacacgttcatgcagatgacacccttcactcgctggaggcttcgtctctctgcgtccgcctcagagaatgcagaattagcgtttccaacagctacagctcccgactccactaccgaggttgtcatcacgttccatgttacggcaatcagacaagttgactggcggcaggaggagaaagaggaggag

SEQ ID NO: 25 - protein, 813 aa, Pteridium aquilinum
MGNSIAAAEARNYEEIYKDANHIGAKSLITPVCSEVMTVCRMYVRLDDLDVKVLERAEEVKVLYVVADVVEVRGDAVQLPPSVQLILSCRVLFFSSGNGWPQVALLQGPLVQYNGNYSPVTGNWSATPLLEQDTYRFFLHGQQLLILSGTSGRASGDNILSEDEKKLQLQSSTAPILPPRWVMEDPHILSGLEASVITSELIVGHMTHAVDLVAEVKLHVEWLLLLLRHVLNETMTNAEANHLLRSLFFRVQSLVRMATAAQNNILVVPRLQHHAYSEYINRLAELARTYDSDFKALTLFIQQNEILGSYLLEQNKAFAEKERDMEVVYTTLNDIKMSELIQALGQLERLGEEMGKMSEEMEQAREDMEKGLKIYRNKQVARAAFSLLNAIAQIGLAIFTAGATTGLAASAVANAGQAITQATEAVQQLRRIFETIEKILLLAEVLVAMRDLLAAINDGGELGTLPEWPEMPTTTEWEIFENEVEAVAAGMPEEVSETLVWKAKCKNVAAIGREMVTQAMLVSQLEYDIKVHSLLQEVAQNQAARLEAIQPTDLIDYQEMAAQLDMRTSRILLSLLQVLALQNGALTYSYLMPRTSLSARSVSATMSAVWGLLLHQGQATLVALGELGSPSTRSVEYVVKGIPVGLLLDGEDWDFTIPVADTLHFPSTWSRVRISHVEMKFVKTGGTAAGRDEELVHQPTTDTGKVYIVLRSELFFQDRRKGQYFKYEATVPAIYHYAYNLATSETTEDNRPDEEFARVFMRMTPFTRWKLRVSTSARENQGLAFPTAITPDATTQIVIRFYLSAIRDFDWNR

SEQ ID NO: 26 - protein, 877 aa, Artificial Sequence
  Synthetic
MALVDYGKLFEDLNQISMGVLDRVEFSEVMVIHRMYVRLADLNVGQLEGAEKVKRLYVFADVVELPVVEWRWPPQIPGSVTVIILCRLLQWPTDGRQSDTELHLTFMKLHAIQREENRWEITAADGMNWGVYIHAEEVQVGVLTMSWSSVLRVSALRSVITSGFRAVSVFEVPGSVRSTLGATLRPDHALYSTTMQATPNASHISAFNLRIVSPSAYRVCPLQNDTDTYLGIPADVAAVLPVDVVTDPNILLGMQTTVHIAELVKACHPSPDVVSAVGEHLNWLNKLLLPLKESTQLQGSESYKECLALLGRVHAAMKMVRIGLVVPQLQYRMYGSLINQMAQVAQNYDREFKQFKLFIIQNQILGSYLLQQNRAFAERELQMESFHAAVISQRREELDNTFAKMDRLSGQMEAESSAMEQAKKEMDEGLRQFQNRQVANALFAVLSAVAQIGLAFLTAGATAPGAVASAGQAVSIAGQAAQGLRRVVEILEQLEAVMEVVAAVKDLVDSLEQVGQIVDAPVMPELPSEADWSIFVNEVEAVAEGMPTEVSEVPVWRAKCKNVAALGREMSITAVQMSELQYDIWVQGMMRDMARSQADRLAAIQPADLTNYLEMATQMDMRTTRMLLGLLNILRIQNAALRYEYLLMPTELTTWPLGMDTVGDLLIAQENAALIGLMQLGPSSDFTSRHVVKDIPVNLLLDGEDWEFEIPVQAGMSSFPSSWSRVRIRHLEMHFVKEASGIGGEIIHQPTTQTGTVYILLQGSTIFHDRRRDQVLPFQAAAPLNYHYAYRLDTGDSTLTNEPSEQFANKFMQMTPFTRWRLRLSASAKENAGLAFPTATALDSTTQIVITFHVTAIRQIDWRHDEEHHHHHHHHHH

SEQ ID NO: 27 - DNA, 2631 bp, Artificial Sequence
  Synthetic
atggctctcgtggattacggcaagcttttcgaggatctgaaccagataagcatgggtgtactggatcgggtagagttttcagaggtgatggtgatccacaggatgtatgtgaggctagctgatctgaatgtggggcagctcgagggagccgagaaagtgaagcggttgtatgtgtttgcggacgtggtggagctaccagtcgtggaatggcggtggccgccgcaaataccaggatcggtgacggtgatcatattgtgtcgtcttcttcaatggccaactgatgggaggcagtcggacaccgagctccacctgacattcatgaagttgcatgccatacaacgagaggaaaatcggtgggagataaccgcagcagatggcatgaactggggagtttacatacacgcagaggaagtacaggttggcgtgctgacaatgtcatggtcttcggtacttagagtttcggcacttcgctctgttataacctccggctttcgcgccgttagtgtgtttgaggtaccgggaagtgtaaggtccacccttggagctactttaaggcccgatcacgccttatatagtacaactatgcaagccacacccaacgcatcgcatattagtgcttttaaccttcgcatagtttccccgtcggcatatcgtgtttgtcctctccaaaatgacacagatacctacttaggtattccagcagacgtggcggcagttcttccagtagacgtggtgactgatcctaacatcttgctgggcatgcagacaacggtacacattgcggagctagtcaaggcatgtcatccgtcacccgatgttgtgagcgctgtaggggagcacctgaactggctcaacaaactcttactcccacttaaggaatcgactcagttgcaaggaagcgagtcgtacaaggagtgccttgcactcttgggtcgtgttcacgctgcgatgaagatggtgagaattggcttagtagtgccccagctgcaatacagaatgtacggtagcctcatcaaccaaatggcccaagtagcacaaaactacgaccgagaattcaagcaattcaaattattcatcatccaaaatcaaatccttggcagctatttgctgcagcagaacagggcatttgctgagagggagctgcagatggagagctttcatgctgctgtcatttctcaaagaagggaggagttggacaatacattcgcaaagatggaccgattgagcgggcaaatggaggcagagagtagtgcaatggagcaagccaaaaaggaaatggacgaaggattgaggcagttccagaataggcaagttgcgaacgccctctttgccgttcttagcgctgtagctcagattgggcttgcattccttacggctggtgcaacggctcctggagctgtggcgtcggcggggcaagctgtgagcatagcaggtcaggcggcgcaaggtctgcgaagggtggtggaaattctagagcagctggaggctgtgatggaggttgtggctgctgtgaaggacctcgtggattcattggaacaggtaggtcagattgtggacgcaccggtgatgccggaattgccctcagaggcggactggtccatttttgtgaacgaggtggaggccgtggcagagggcatgccaacggaagtctcggaggttccggtgtggagggccaagtgcaagaatgtggctgcactgggtcgggagatgagcatcacggcagtacagatgtcggagctgcagtatgacatctgggtgcaaggcatgatgcgggatatggctcgaagccaggcagacaggctggccgcaattcaacccgcggaccttaccaactatttggagatggctacccagatggatatgcggactacgaggatgctgctggggctcctcaacatattgcgcatccagaatgcggcgctcaggtacgagtatcttctaatgcccacggagctcacaacatggccactgggtatggataccgtgggtgacttgctcatcgcgcaggagaatgctgcactgataggattaatgcagctagggccctcatctgatttcacgagcaggcatgtggtgaaagacatacctgtgaacttgctgctcgatggcgaggattgggagtttgagattcctgtgcaagctggcatgtccagcttcccttccagctggtctcgcgtccgtattcggcacctggagatgcactttgtgaaggaggccagcggtattggtggtgagattatccaccagcctaccacccagactgggaccgtttacatccttctgcagggttccactatcttccatgaccgcagaagagaccaggtgttgccttttcaggccgctgctccgctcaactaccattacgcgtaccgcctcgacaccggcgactccactctcacaaacgaaccctctgaacagtttgccaacaagttcatgcagatgacacccttcacccgttggaggcttcgtctgtctgcgtccgcaaaagagaatgcaggattagcctttcccacggctacagcacttgactccactacccagattgtcatcactttccatgttacggccatcagacaaattgactggcggcacgacgaagagcaccatcaccatcaccatcaccatcaccat

SEQ ID NO: 28 - DNA, 2604 bp, Artificial Sequence
  Synthetic
atggctgcactggtcgactacggcaagctgttcgaggacctcaaccagatctcgatgggagtcctggaccgcgtcgagttctccgaggtgatggtgatccaccgcatgtacgtccgccttgccgacctgaacgtcggacagctggagggagccgagaaggtcaagcgcctgtacgtgttcgcggatgtcgtcgagctgccggtcgtcgagtggaggtggccacctcagatcccaggttccgtgaccgtgatcatcctctgccggctcctccagtggccgacagacggcaggcagtctgacaccgagctgcacctgaccttcatgaagctgcacgccatccagcgcgaggagaaccgctgggagatcaccgctgccgacggcatgaactggggtgtgtacatccacgccgaggaggtccaagtgggcgtcctcacgatgtcctggtcgagcgtgctgagggtttccgcgctcaggtcggtcatcaccagcggattccgggcggtcagcgtgttcgaggttcccggatctgtgaggagcacgctgggtgccaccttgaggcctgatcacgcgctgtactcgaccaccatgcaagccacgcccaacgccagccacatctcggccttcaacctgcgcatcgtgagcccgtcagcctatcgcgtgtgtccgctccagaacgacaccgacacctacctgggcatccctgcagatgtcgcagccgttctcccggtcgacgtcgttaccgacccgaacatcctgctgggcatgcagaccaccgtccacatcgccgagctcgtgaaggcttgccacccgtctcctgacgtcgtctcggcggtcggagagcacctgaactggctgaacaagctcctcctgccgctcaaggagtcgacgcagctccaaggctccgagtcctacaaggagtgcctcgccctcctcggacgggttcacgccgcgatgaagatggtgcgcatagggctggtggtccctcagctgcagtaccgcatgtacgggagcctgatcaaccagatggcccaggtggcccagaactacgaccgcgagttcaagcagttcaagctgttcatcatccagaaccagatcctcgggtcgtacctcctgcagcaaaaccgggcgttcgctgagagggagctgcagatggagtccttccacgccgccgtgatctcccagaggcgggaggagctcgacaacacgttcgcgaagatggaccgcctgtccgggcagatggaggcggagtcctcggcgatggagcaggccaagaaggagatggacgagggcctcaggcagttccagaaccggcaggtcgcgaacgcactcttcgccgtgttgtccgcagtggctcagataggcctcgccttcctgaccgcaggcgctacagccccaggagcggttgccagcgctggacaagcggtctcgatcgcaggtcaggctgcacagggactcagacgcgtggtggagatcctggagcagctggaggccgtcatggaggtcgtggcagccgtgaaggacctcgtcgacagcctcgagcaggtcggtcagatcgtcgacgctccagtcatgcccgagttgccgagcgaagccgactggtccatcttcgtcaacgaggtggaggcagtggcagagggtatgcccaccgaggtctctgaggtgcccgtgtggagggcgaagtgcaagaacgtcgctgccttgggccgcgagatgtcgatcacggccgtgcagatgtccgagctccagtacgacatctgggtccaagggatgatgcgcgacatggcgaggagccaggctgatcgcttggccgcgatccagccagcggacctcacgaactacctggagatggcgacccagatggacatgcggacgacccgcatgctgctcgggctcctgaacatcctccgcatccagaacgcggccctgcgctacgagtacctgctgatgcccaccgagctgaccacctggccgttgggtatggacaccgtcggcgacctcctgattgcgcaggagaacgccgcgctcatcggactgatgcagctcggcccatcgtccgacttcaccagcaggcacgtcgtcaaggacatccccgtgaacctgctgctcgacggcgaggactgggagttcgagatcccagttcaggccggcatgagctcgttcccgtccagctggagcagggtccggatacgccacctcgagatgcacttcgtgaaggaggcctcgggcatcggaggcgagatcatccaccagccgaccacgcagacgggcacggtgtacatcctgctgcaaggctcgaccatcttccacgaccgcagacgcgaccaggtcctcccgttccaagccgcagcaccgctgaactaccactacgcgtaccgccttgacaccggtgactccaccttgaccaacgagcccagcgagcagttcgcgaacaagttcatgcagatgaccccgttcacccgctggaggctgaggctctccgcatctgcgaaggagaacgcgggtcttgcgttcccaacggcaacggccctcgactccacgacgcagatcgtcatcaccttccacgtcaccgcgatcaggcagatcgactggcgccacgacgaggag

SEQ ID NO: 29 - DNA, 2604 bp, Artificial Sequence
  Synthetic
atggcagcactggtggactacggcaagctcttcgaggacctcaaccagatctctatgggcgtcctggaccgggtcgagttcagcgaggtgatggtgatccaccggatgtacgtgaggctcgccgaccttaacgtgggccagctcgagggtgccgagaaggtgaagcggctgtacgtcttcgccgacgtggtcgagctgccagtggtcgagtggaggtggcctccgcagatcccgggtagcgtgaccgtcatcatcctctgccgcctgcttcagtggcccactgacggacggcagtcagacaccgagctgcacctcaccttcatgaagctgcacgcgatccagcgggaggagaaccggtgggagatcacggcagccgacggcatgaactggggcgtctacatccacgcggaggaggtccaagtgggcgtgctgacgatgtcgtggtcgagcgtgctcagggtttccgcgctgaggagcgtcatcaccagcggctttcgggcagtgtccgtcttcgaggtgccaggctcagtcaggtccacgctcggagccaccctcagacccgatcacgcgctctactccaccaccatgcaagccacgccgaacgcgtcccacatcagcgcgttcaacctccggatagtcagcccatccgcctatcgcgtctgcccgctgcagaacgacaccgacacgtacctcggcattcccgcagacgttgccgcagtcctgcccgtcgatgtggtcaccgacccgaacatcctgctcggcatgcagacgacggtgcacatcgctgagctcgtcaaagcctgccaccctagcccagatgtggtgtcagccgtcggagagcacctgaactggctcaacaagctcctgctgccgctcaaggagtcgacccagctgcaagggtcggagtcctacaaggagtgcctcgcgctgctcggacgggttcacgccgccatgaagatggtccggatcgggttggtcgtgccacagctccagtaccggatgtacggctcgctcatcaaccagatggcccaggtggcccagaactacgaccgggagttcaagcagttcaagctgttcatcatccagaaccagatcctcggctcgtacctgctgcagcagaaccgggcgttcgctgagagggagctgcagatggagtcgttccacgcagccgtgatctcgcagaggcgcgaggagctggacaacaccttcgcgaagatggaccgcctcagcggccagatggaagccgagtcgtccgcgatggagcaggcgaagaaggagatggacgagggcctccggcagttccagaaccggcaggtggcgaacgccctcttcgctgtgcttagcgccgtggctcagatcgggttggcgtttctcaccgccggagccacagctcctggtgcagtggcgtcagcaggtcaagcggtctcgatagccggccaggcagcgcaagggctgaggagggtggtcgagatcctcgagcagctcgaagccgtcatggaggtggtcgccgctgtcaaggacctggtggacagcctcgagcaagtcggccagatcgtggacgcgccagtgatgcccgagttgcccagcgaagcggactggtccatcttcgtgaacgaggtggaggcggtggcagagggcatgcctaccgaggtgagcgaggtgccagtctggagggcgaagtgcaagaacgtcgcggcgctgggtcgggagatgtcgatcaccgcggttcagatgtcggagctccagtacgacatctgggtgcaagggatgatgcgggacatggcgaggtcgcaagccgatcgccttgctgcgatccagcctgccgacctgacgaactacctggagatggccacccagatggacatgcggaccacgcgcatgctcctcggcctgctcaacatcctccgcatccagaacgcggcgctccgctacgagtacctgctgatgcccaccgagctcacgacctggccactcggcatggacaccgttggcgacctcctcatcgcccaggagaacgcggccctcatagggctcatgcagctgggaccgtcgagcgacttcacctcgaggcacgtggtcaaggacatccccgtcaacctgctcctggacggcgaggactgggagttcgagatcccggttcaagccggcatgtcctcgttcccgtcgagctggtcgagagtgcgcatccggcacctggagatgcacttcgtgaaggaggccagcgggataggcggtgagatcatccaccagcccacgacgcagaccggcaccgtgtacatcctcctccaagggtccacgatcttccacgaccggaggcgggatcaggtcttgcccttccaagcggctgcacctctgaactaccactacgcgtatcggctggacaccggcgactcgaccctcaccaacgagccgtccgagcagttcgcgaacaagttcatgcagatgacgcccttcacgcgctggaggctgaggttgtccgcatccgccaaggagaacgctggactcgcctttccgaccgctacggcactcgactccacgacccagatcgtgatcacgttccacgtcaccgccatccgccagatcgactggcggcacgacgaggag

SEQ ID NO: 30 - DNA, 26 bp, Artificial Sequence
  Synthetic
ccatggctctcgtggattacggcaag

SEQ ID NO: 31 - DNA, 30 bp, Artificial Sequence
  Synthetic
gttaacctactcttcgtcgtgccgccagtc

SEQ ID NO: 32 - DNA, 41 bp, Artificial Sequence
  Synthetic
tttaacttagcctaggatccatggaatatagcagcttgtac

SEQ ID NO: 33 - DNA, 42 bp, Artificial Sequence
  Synthetic
actccttctttagttaacttactccacatcaccctcttgtcg

SEQ ID NO: 34 - protein, 809 aa, Asplenium australasicum
MAAGDYSVLYQDVNQISIRLEKMDFSEVMAVHRMFVRMDDLDVSSGTGLLSGAEKVKRLYVFADVVELPSKQLRLPGTDLIVILCRIFVTNGRHSTELFLPSMNMSMVAPGTGSIRGVILSPTTVLTTSSDALQFKLQSGSMTSVMRLKDVSVAATLTCNVQAASASMPLTVKTTGTSPGNICVLGMSTAVVVPESAVAVITDANILLGMQVTVLIAELVKIAHNSDVLIAAVTRHVEWLNHLLVQAHAAAPSEDVVALLYRTQGFIKLRNEGLIVPRLQYRMYKDLIDRMVQVAQSYDQDFKQLKLFVEQNKILGSYLLEQNKAFAEKEKDMDAFHSQVIDLRTSELESTIERMDDLSKQMEEQNAAMEQAKADMDAGLIAYQNKQVANAVFAVLGAIASIGLAFATGGATAPGAVASAGAAVTAAGKAAEGLKKVVEILEGLQAVMEVVAVIKELVQSLQEIGQLVDAPEMPDLPSDAEWEIFVNEVEAVAEQMPTEVTEVPAWKAKCKNVAALGREMSTMAAHIAELQFEIQVQEMLREIAKKQADRLSSIKPADLTNYLEMVSEMDMRTTRMLLELIRVLYIQNAALQYEYLQTPAPLNAWPVTMQTVWGLLVQQETAAINGLLQMGAPSDYTQEYAVRDVPVRLLLGGGDWEFELPVRNADFPLTWCRVRIRYVDMRFDAAAEHLPVTSTGEVYMLLQSSRFFEDRAKRENEFISYEGGMGLQYQYAYRLATGDATVTNVPSEEYANTFMRLAPFTRWRLRLSASAPENKGLAFPTATLADATTRIKITFHVSAIRRISTRVAV

SEQ ID NO: 35 - protein, 807 aa, Polypodium musifolium
MADLDYSKLYQDLNQISVRLEKTEFSEVMVVHRMFVRMDDLDVSSGSGLLSGAEKVKRLYVFADVVELPSKQVRLAGTDMIVVFCRIFVPEGRHYAELFLPSMNMSMVGADGEGSIRGVILSPTVLTTLSNALQFRLECGSMTSVMRLNDVSAGATLTCNVQAASACVPLKVKTTGTSPGNICVLGLSTAAVVPESVVAVITDANILLGMQVTVLIAELVKIAHNSDGVIAAVTRHVEWLNHLLVQAQAAAPSEDVVALLYRTQAFIKLRKEGLIVPRLQYHMYKDLIDRMVQVAQSYDQDFKQMKLYVEQNKILGSYLLEQNKAFAEKEKDMDASHSQVIALRTSELQSTIERMDDLSKQMEVQSTAMEKAKADMDAGLIVYQNKQVADAVFAVMEAIASIGLAFATGGATAPGAVASAGAAVSAAGKAGEGLKKVVEILEGLQAIMEVIAAIKGLVQSLQKIGQLVNAPEMPDLPSEAEWEMFVKEVEAVAAQMPTEVTQVPAWTAKCKNVAALGREMSTTAAHIAELQYEIQVQGMLQQIAKKQADRLSSIKPADLTNYFEMVSEMDMRTTRMLLELIQVLNIQNGALRYEYLQPAAPLNAWPVTMQTVWGLLVQQEAAAINGLLQLGAPSDFTREYVVGDIPVKLLLGGGDWEFELPVTDADFPLTWCRVRIQHVDMQFDAAAEHLPTTSTGEVYMLLQSSRFFEDRAQHEDEFISYEAGTGLQYQYAYRLATGEATVTNVPSEAYVNTFMLLAPFTRWRLRLSSSAPENKGLAFPTATSADATTRIKITFHVSAIRRISLAR

SEQ ID NO: 36 - protein, 813 aa, Adiantum pedatum
MADIDYSVLYNDVNQISIRLERMDFSEVMAVHRMFVRMDDLDVSSGTGVLEGAQNVKRLYVFADVVELPSKQVRLPGSDMIVILCRIFVRNGRHNTELFLPSMNMSMVAAGNGTIRGVNLSTTMSSSSSNALQFNLRSGSMTSTVRLKDVDVAAALTCDVQAASASMPLTVMTTGTSPGNIWVLGMTTAVVIPESAVAVITDANILLGMQVTVLIAELVKTAHNSDVIIAAITRHVEWLNHLLVQAHAAAPNEDVITLLYRTQAFIKLKREGLVVPRLQYHMYKNLIDRMVQVAQNYDQDFRQLKLFVEQNKILGSYLLEQNKAFAEKEKDMDAFHSQIIALRTTELNNTIERMGELSKQMDQENEAMEQAKADMDAGLIEYQNRQVANALFAVLGAIASIGLAFATGGATAPGAVSAAGAAVTAAGKAAEGLKKVVEILEGLQVVMEVVAAIKELVQSLQQIGQLVDAPEMPDLPSNADWEIFVNEVEAVAEQMPTEVTQVAAWKAKCKNVAALGREMSTMAAHIAELQYQIQVQEMLREIAQKQADRLSSISPADLTNYLEMVSQMDMRTTRMLLELIRVLYIQNAALQYEYLQTPAPLNAWPVAMQTVWGLLIQQETTAITGLLQLGAPSDFTQEYVVKDIPVSLLLEGRDWEFELPVLNADFPSTWSRVRIHHVDMQFDAAATSIHIPTTNTGVVYLLLQSSRFFDDRARRANEFISYEAGTGLFYQYAYRLATGEATVTNIPTDEYANTFMRLTPFTRWRLRLSLSAEENAGLAFPTATSADDTTQIKITFHVSAIRRISTRSDGVSS

SEQ ID NO: 37 - DNA, 44 bp, Artificial Sequence
  Synthetic
  misc_feature (22)..(23): n is a, c, g, or t
cagctcgagggagccgagaaannkaagcggttgtatgtgtttgc

SEQ ID NO: 38 - DNA, 13 bp, Artificial Sequence
  Synthetic
ttttttttttttt

SEQ ID NO: 39 - DNA, 43 bp, Artificial Sequence
  Synthetic
  misc_feature (20)..(21): n is a, c, g, or t
cgagggagccgagaaagtgnnkcggttgtatgtgtttgcggac

SEQ ID NO: 40 - DNA, 43 bp, Artificial Sequence
  Synthetic
  misc_feature (23)..(24): n is a, c, g, or t
gtccgcaaacacatacaaccgmnncactttctcggctccctcg

SEQ ID NO: 41 - DNA, 44 bp, Artificial Sequence
  Synthetic
  misc_feature (21)..(22): n is a, c, g, or t
agggagccgagaaagtgaagnnkttgtatgtgtttgcggacgtg

SEQ ID NO: 42 - DNA, 44 bp, Artificial Sequence
  Synthetic
  misc_feature (23)..(24): n is a, c, g, or t
cacgtccgcaaacacatacaamnncttcactttctcggctccct

SEQ ID NO: 43 - DNA, 42 bp, Artificial Sequence
  Synthetic
  misc_feature (21)..(22): n is a, c, g, or t
gagccgagaaagtgaagcggnnktatgtgtttgcggacgtgg

SEQ ID NO: 44 - DNA, 42 bp, Artificial Sequence
  Synthetic
  misc_feature (21)..(22): n is a, c, g, or t
ccacgtccgcaaacacatamnnccgcttcactttctcggctc

SEQ ID NO: 45 - DNA, 44 bp, Artificial Sequence
  Synthetic
  misc_feature (21)..(22): n is a, c, g, or t
ccgagaaagtgaagcggttgnnkgtgtttgcggacgtggtggag

SEQ ID NO: 46 - DNA, 44 bp, Artificial Sequence
  Synthetic
  misc_feature (23)..(24): n is a, c, g, or t
ctccaccacgtccgcaaacacmnncaaccgcttcactttctcgg

SEQ ID NO: 47 - DNA, 46 bp, Artificial Sequence
  Synthetic
  misc_feature (22)..(23): n is a, c, g, or t
gagaaagtgaagcggttgtatnnktttgcggacgtggtggagctac

SEQ ID NO: 48 - DNA, 46 bp, Artificial Sequence
  Synthetic
  misc_feature (24)..(25): n is a, c, g, or t
gtagctccaccacgtccgcaaamnnatacaaccgcttcactttctc

SEQ ID NO: 49 - DNA, 43 bp, Artificial Sequence
  Synthetic
  misc_feature (21)..(22): n is a, c, g, or t
aagtgaagcggttgtatgtgnnkgcggacgtggtggagctacc

SEQ ID NO: 50 - DNA, 43 bp, Artificial Sequence
  Synthetic
  misc_feature (22)..(23): n is a, c, g, or t
ggtagctccaccacgtccgcmnncacatacaaccgcttcactt

SEQ ID NO: 51 - DNA, 46 bp, Artificial Sequence
  Synthetic
  misc_feature (22)..(23): n is a, c, g, or t
gtgaagcggttgtatgtgtttnnkgacgtggtggagctaccagtcg

SEQ ID NO: 52 - DNA, 46 bp, Artificial Sequence
  Synthetic
  misc_feature (24)..(25): n is a, c, g, or t
cgactggtagctccaccacgtcmnnaaacacatacaaccgcttcac

SEQ ID NO: 53 - DNA, 47 bp, Artificial Sequence
  Synthetic
  misc_feature (23)..(24): n is a, c, g, or t
gaagcggttgtatgtgtttgcgnnkgtggtggagctaccagtcgtgg

SEQ ID NO: 54 - DNA, 47 bp, Artificial Sequence
  Synthetic
  misc_feature (24)..(25): n is a, c, g, or t
ccacgactggtagctccaccacmnncgcaaacacatacaaccgcttc

SEQ ID NO: 55 - DNA, 42 bp, Artificial Sequence
  Synthetic
  misc_feature (21)..(22): n is a, c, g, or t
ggttgtatgtgtttgcggacnnkgtggagctaccagtcgtgg

SEQ ID NO: 56 - DNA, 42 bp, Artificial Sequence
  Synthetic
  misc_feature (21)..(22): n is a, c, g, or t
ccacgactggtagctccacmnngtccgcaaacacatacaacc

SEQ ID NO: 57 - DNA, 44 bp, Artificial Sequence
  Synthetic
  misc_feature (21)..(22): n is a, c, g, or t
tgtatgtgtttgcggacgtgnnkgagctaccagtcgtggaatgg

SEQ ID NO: 58 - DNA, 44 bp, Artificial Sequence
  Synthetic
  misc_feature (23)..(24): n is a, c, g, or t
ccattccacgactggtagctcmnncacgtccgcaaacacataca

SEQ ID NO: 59 - DNA, 43 bp, Artificial Sequence
  Synthetic
  misc_feature (21)..(22): n is a, c, g, or t
atgtgtttgcggacgtggtgnnkctaccagtcgtggaatggcg

SEQ ID NO: 60 - DNA, 43 bp, Artificial Sequence
  Synthetic
  misc_feature (22)..(23): n is a, c, g, or t
cgccattccacgactggtagmnncaccacgtccgcaaacacat

SEQ ID NO: 61 - DNA, 43 bp, Artificial Sequence
  Synthetic
  misc_feature (21)..(22): n is a, c, g, or t
tgtttgcggacgtggtggagnnkccagtcgtggaatggcggtg

SEQ ID NO: 62 - DNA, 43 bp, Artificial Sequence
  Synthetic
  misc_feature (22)..(23): n is a, c, g, or t
caccgccattccacgactggmnnctccaccacgtccgcaaaca

SEQ ID NO: 63 - DNA, 45 bp, Artificial Sequence
  Synthetic
  misc_feature (23)..(24): n is a, c, g, or t
gtttgcggacgtggtggagctannkgtcgtggaatggcggtggcc

SEQ ID NO: 64 - DNA, 45 bp, Artificial Sequence
  Synthetic
  misc_feature (22)..(23): n is a, c, g, or t
ggccaccgccattccacgacmnntagctccaccacgtccgcaaac

SEQ ID NO: 65 - DNA, 55 bp, Artificial Sequence
  Synthetic
  misc_feature (32)..(33): n is a, c, g, or t
caagcaattcaaattattcatcatccaaaatnnkatccttggcagctatttgctg

SEQ ID NO: 66 - DNA, 53 bp, Artificial Sequence
  Synthetic
  misc_feature (21)..(22): n is a, c, g, or t
gcaaatagctgccaaggatmnnattttggatgatgaataatttgaattgcttg

SEQ ID NO: 67 - DNA, 53 bp, Artificial Sequence
  Synthetic
  misc_feature (32)..(33): n is a, c, g, or t
gcaattcaaattattcatcatccaaaatcaannkcttggcagctatttgctgc

SEQ ID NO: 68 - DNA, 53 bp, Artificial Sequence
  Synthetic
  misc_feature (21)..(22): n is a, c, g, or t
gcagcaaatagctgccaagmnnttgattttggatgatgaataatttgaattgc

SEQ ID NO: 69 - DNA, 56 bp, Artificial Sequence
  Synthetic
  misc_feature (35)..(36): n is a, c, g, or t
gcaattcaaattattcatcatccaaaatcaaatcnnkggcagctatttgctgcagc

SEQ ID NO: 70 - DNA, 56 bp, Artificial Sequence
  Synthetic
  misc_feature (21)..(22): n is a, c, g, or t
gctgcagcaaatagctgccmnngatttgattttggatgatgaataatttgaattgc

SEQ ID NO: 71 - DNA, 52 bp, Artificial Sequence
  Synthetic
  misc_feature (32)..(33): n is a, c, g, or t
caaattattcatcatccaaaatcaaatccttnnkagctatttgctgcagcag

SEQ ID NO: 72 - DNA, 52 bp, Artificial Sequence
  Synthetic
  misc_feature (20)..(21): n is a, c, g, or t
ctgctgcagcaaatagctmnnaaggatttgattttggatgatgaataatttg

SEQ ID NO: 73 - DNA, 48 bp, Artificial Sequence
  Synthetic
  misc_feature (26)..(27): n is a, c, g, or t
catcatccaaaatcaaatccttggcnnktatttgctgcagcagaacag

SEQ ID NO: 74 - DNA, 48 bp, Artificial Sequence
  Synthetic
  misc_feature (22)..(23): n is a, c, g, or t
ctgttctgctgcagcaaatamnngccaaggatttgattttggatgatg

SEQ ID NO: 75 - DNA, 43 bp, Artificial Sequence
  Synthetic
  misc_feature (23)..(24): n is a, c, g, or t
ccaaaatcaaatccttggcagcnnkttgctgcagcagaacagg

SEQ ID NO: 76 - DNA, 43 bp, Artificial Sequence
  Synthetic
  misc_feature (20)..(21): n is a, c, g, or t
cctgttctgctgcagcaamnngctgccaaggatttgattttgg

SEQ ID NO: 77 - DNA, 50 bp, Artificial Sequence
  Synthetic
  misc_feature (26)..(27): n is a, c, g, or t
ccaaaatcaaatccttggcagctatnnkctgcagcagaacagggcatttg

SEQ ID NO: 78 - DNA, 50 bp, Artificial Sequence
  Synthetic
  misc_feature (24)..(25): n is a, c, g, or t
caaatgccctgttctgctgcagmnnatagctgccaaggatttgattttgg

SEQ ID NO: 79 - DNA, 43 bp, Artificial Sequence
  Synthetic
  misc_feature (22)..(23): n is a, c, g, or t
caaatccttggcagctatttgnnkcagcagaacagggcatttg

SEQ ID NO: 80 - DNA, 43 bp, Artificial Sequence
  Synthetic
  misc_feature (21)..(22): n is a, c, g, or t
caaatgccctgttctgctgmnncaaatagctgccaaggatttg

SEQ ID NO: 81 - DNA, 41 bp, Artificial Sequence
  Synthetic
  misc_feature (20)..(21): n is a, c, g, or t
ccttggcagctatttgctgnnkcagaacagggcatttgctg

SEQ ID NO: 82 - DNA, 41 bp, Artificial Sequence
  Synthetic
  misc_feature (21)..(22): n is a, c, g, or t
cagcaaatgccctgttctgmnncagcaaatagctgccaagg

SEQ ID NO: 83 - DNA, 41 bp, Artificial Sequence
  Synthetic
  misc_feature (19)..(20): n is a, c, g, or t
ggcagctatttgctgcagnnkaacagggcatttgctgagag

SEQ ID NO: 84 - DNA, 41 bp, Artificial Sequence
  Synthetic
  misc_feature (22)..(23): n is a, c, g, or t
ctctcagcaaatgccctgttmnnctgcagcaaatagctgcc

SEQ ID NO: 85 - DNA, 40 bp, Artificial Sequence
  Synthetic
  misc_feature (20)..(21): n is a, c, g, or t
cagctatttgctgcagcagnnkagggcatttgctgagagg

SEQ ID NO: 86 - DNA, 40 bp, Artificial Sequence
  Synthetic
  misc_feature (20)..(21): n is a, c, g, or t
cctctcagcaaatgccctmnnctgctgcagcaaatagctg

SEQ ID NO: 87 - DNA, 46 bp, Artificial Sequence
  Synthetic
  misc_feature (22)..(23): n is a, c, g, or t
gaagtctcggaggttccggtgnnkagggccaagtgcaagaatgtgg

SEQ ID NO: 88 - DNA, 46 bp, Artificial Sequence
  Synthetic
  misc_feature (24)..(25): n is a, c, g, or t
ccacattcttgcacttggccctmnncaccggaacctccgagacttc

SEQ ID NO: 89 - DNA, 44 bp, Artificial Sequence
  Synthetic
  misc_feature (22)..(23): n is a, c, g, or t
gtctcggaggttccggtgtggnnkgccaagtgcaagaatgtggc

SEQ ID NO: 90 - DNA, 44 bp, Artificial Sequence
  Synthetic
  misc_feature (22)..(23): n is a, c, g, or t
gccacattcttgcacttggcmnnccacaccggaacctccgagac

SEQ ID NO: 91 - DNA, 45 bp, Artificial Sequence
  Synthetic
  misc_feature (21)..(22): n is a, c, g, or t
cggaggttccggtgtggaggnnkaagtgcaagaatgtggctgcac

SEQ ID NO: 92 - DNA, 45 bp, Artificial Sequence
  Synthetic
  misc_feature (24)..(25): n is a, c, g, or t
gtgcagccacattcttgcacttmnncctccacaccggaacctccg

SEQ ID NO: 93 - DNA, 45 bp, Artificial Sequence
  Synthetic
  misc_feature (22)..(23): n is a, c, g, or t
gaggttccggtgtggagggccnnktgcaagaatgtggctgcactg

SEQ ID NO: 94 - DNA, 45 bp, Artificial Sequence
  Synthetic
  misc_feature (23)..(24): n is a, c, g, or t
cagtgcagccacattcttgcamnnggccctccacaccggaacctc

SEQ ID NO: 95 - DNA, 46 bp, Artificial Sequence
  Synthetic
  misc_feature (22)..(23): n is a, c, g, or t
gttccggtgtggagggccaagnnkaagaatgtggctgcactgggtc

SEQ ID NO: 96 - DNA, 46 bp, Artificial Sequence
  Synthetic
  misc_feature (24)..(25): n is a, c, g, or t
gacccagtgcagccacattcttmnncttggccctccacaccggaac

SEQ ID NO: 97 - DNA, 43 bp, Artificial Sequence
  Synthetic
  misc_feature (21)..(22): n is a, c, g, or t
cggtgtggagggccaagtgcnnkaatgtggctgcactgggtcg

SEQ ID NO: 98 - DNA, 43 bp, Artificial Sequence
  Synthetic
  misc_feature (22)..(23): n is a, c, g, or t
cgacccagtgcagccacattmnngcacttggccctccacaccg

SEQ ID NO: 99 - DNA, 45 bp, Artificial Sequence
  Synthetic
  misc_feature (22)..(23): n is a, c, g, or t
gtgtggagggccaagtgcaagnnkgtggctgcactgggtcgggag

SEQ ID NO: 100 - DNA, 45 bp, Artificial Sequence
  Synthetic
  misc_feature (23)..(24): n is a, c, g, or t
ctcccgacccagtgcagccacmnncttgcacttggccctccacac

SEQ ID NO: 101 - DNA, 44 bp, Artificial Sequence
  Synthetic
  misc_feature (21)..(22): n is a, c, g, or t
ggagggccaagtgcaagaatnnkgctgcactgggtcgggagatg

SEQ ID NO: 102 - DNA, 44 bp, Artificial Sequence
  Synthetic
  misc_feature (23)..(24): n is a, c, g, or t
catctcccgacccagtgcagcmnnattcttgcacttggccctcc

SEQ ID NO: 103 - DNA, 46 bp, Artificial Sequence
  Synthetic
  misc_feature (23)..(24): n is a, c, g, or t
gagggccaagtgcaagaatgtgnnkgcactgggtcgggagatgagc

SEQ ID NO: 104 - DNA, 46 bp, Artificial Sequence
  Synthetic
  misc_feature (23)..(24): n is a, c, g, or t
gctcatctcccgacccagtgcmnncacattcttgcacttggccctc

SEQ ID NO: 105 - DNA, 43 bp, Artificial Sequence
  Synthetic
  misc_feature (21)..(22): n is a, c, g, or t
cggcgctcaggtacgagtatnnkctaatgcccacggagctcac

SEQ ID NO: 106 - DNA, 43 bp, Artificial Sequence
  Synthetic
  misc_feature (22)..(23): n is a, c, g, or t
gtgagctccgtgggcattagmnnatactcgtacctgagcgccg

SEQ ID NO: 107 - DNA, 43 bp, Artificial Sequence
  Synthetic
  misc_feature (21)..(22): n is a, c, g, or t
cgctcaggtacgagtatcttnnkatgcccacggagctcacaac

SEQ ID NO: 108 - DNA, 43 bp, Artificial Sequence
  Synthetic
  misc_feature (22)..(23): n is a, c, g, or t
gttgtgagctccgtgggcatmnnaagatactcgtacctgagcg

SEQ ID NO: 109 - DNA, 46 bp, Artificial Sequence
  Synthetic
  misc_feature (23)..(24): n is a, c, g, or t
gctcaggtacgagtatcttctannkcccacggagctcacaacatgg

SEQ ID NO: 110 - DNA, 46 bp, Artificial Sequence
  Synthetic
  misc_feature (23)..(24): n is a, c, g, or t
ccatgttgtgagctccgtgggmnntagaagatactcgtacctgagc

SEQ ID NO: 111 - DNA, 43 bp, Artificial Sequence
  Synthetic
  misc_feature (21)..(22): n is a, c, g, or t
ggtacgagtatcttctaatgnnkacggagctcacaacatggcc

SEQ ID NO: 112 - DNA, 43 bp, Artificial Sequence
  Synthetic
  misc_feature (22)..(23): n is a, c, g, or t
ggccatgttgtgagctccgtmnncattagaagatactcgtacc

SEQ ID NO: 113 - DNA, 47 bp, Artificial Sequence
  Synthetic
  misc_feature (24)..(25): n is a, c, g, or t
ggtacgagtatcttctaatgcccnnkgagctcacaacatggccactg

SEQ ID NO: 114 - DNA, 47 bp, Artificial Sequence
  Synthetic
  misc_feature (23)..(24): n is a, c, g, or t
cagtggccatgttgtgagctcmnngggcattagaagatactcgtacc

SEQ ID NO: 115 - DNA, 45 bp, Artificial Sequence
  Synthetic
  misc_feature (23)..(24): n is a, c, g, or t
cgagtatcttctaatgcccacgnnkctcacaacatggccactggg

SEQ ID NO: 116 - DNA, 45 bp, Artificial Sequence
  Synthetic
  misc_feature (22)..(23): n is a, c, g, or t
cccagtggccatgttgtgagmnncgtgggcattagaagatactcg

SEQ ID NO: 117 - DNA, 49 bp, Artificial Sequence
  Synthetic
  misc_feature (25)..(26): n is a, c, g, or t
gagtatcttctaatgcccacggagnnkacaacatggccactgggtatgg

SEQ ID NO: 118 - DNA, 49 bp, Artificial Sequence
  Synthetic
  misc_feature (24)..(25): n is a, c, g, or t
ccatacccagtggccatgttgtmnnctccgtgggcattagaagatactc

SEQ ID NO: 119 - DNA, 47 bp, Artificial Sequence
  Synthetic
  misc_feature (22)..(23): n is a, c, g, or t
cttctaatgcccacggagctcnnkacatggccactgggtatggatac

SEQ ID NO: 120 - DNA, 47 bp, Artificial Sequence
  Synthetic
  misc_feature (25)..(26): n is a, c, g, or t
gtatccatacccagtggccatgtmnngagctccgtgggcattagaag

SEQ ID NO: 121 - DNA, 45 bp, Artificial Sequence
  Synthetic
  misc_feature (22)..(23): n is a, c, g, or t
ctaatgcccacggagctcacannktggccactgggtatggatacc

SEQ ID NO: 122 - DNA, 45 bp, Artificial Sequence
  Synthetic
  misc_feature (23)..(24): n is a, c, g, or t
ggtatccatacccagtggccamnntgtgagctccgtgggcattag

SEQ ID NO: 123 - DNA, 44 bp, Artificial Sequence
  Synthetic
  misc_feature (20)..(21): n is a, c, g, or t
gcccacggagctcacaacannkccactgggtatggataccgtgg

SEQ ID NO: 124 - DNA, 44 bp, Artificial Sequence
  Synthetic
  misc_feature (24)..(25): n is a, c, g, or t
ccacggtatccatacccagtggmnntgttgtgagctccgtgggc

SEQ ID NO: 125 - DNA, 47 bp, Artificial Sequence
  Synthetic
  misc_feature (21)..(22): n is a, c, g, or t
ccactatcttccatgaccgcnnkagagaccaggtgttgccttttcag

SEQ ID NO: 126 - DNA, 47 bp, Artificial Sequence
  Synthetic
  misc_feature (26)..(27): n is a, c, g, or t
ctgaaaaggcaacacctggtctctmnngcggtcatggaagatagtgg

SEQ ID NO: 127 - DNA, 45 bp, Artificial Sequence
  Synthetic
  misc_feature (21)..(22): n is a, c, g, or t
ctatcttccatgaccgcagannkgaccaggtgttgccttttcagg

SEQ ID NO: 128 - DNA, 45 bp, Artificial Sequence
  Synthetic
  misc_feature (24)..(25): n is a, c, g, or t
cctgaaaaggcaacacctggtcmnntctgcggtcatggaagatag

SEQ ID NO: 129 - DNA, 46 bp, Artificial Sequence
  Synthetic
  misc_feature (24)..(25): n is a, c, g, or t
ctatcttccatgaccgcagaagannkcaggtgttgccttttcaggc

SEQ ID NO: 130 - DNA, 46 bp, Artificial Sequence
  Synthetic
  misc_feature (22)..(23): n is a, c, g, or t
gcctgaaaaggcaacacctgmnntcttctgcggtcatggaagatag

SEQ ID NO: 131 - DNA, 45 bp, Artificial Sequence
  Synthetic
  misc_feature (23)..(24): n is a, c, g, or t
cttccatgaccgcagaagagacnnkgtgttgccttttcaggccgc

SEQ ID NO: 132 - DNA, 45 bp, Artificial Sequence
  Synthetic
  misc_feature (22)..(23): n is a, c, g, or t
gcggcctgaaaaggcaacacmnngtctcttctgcggtcatggaag

SEQ ID NO: 133 - DNA, 44 bp, Artificial Sequence
  Synthetic
  misc_feature (22)..(23): n is a, c, g, or t
catgaccgcagaagagaccagnnkttgccttttcaggccgctgc

SEQ ID NO: 134 - DNA, 44 bp, Artificial Sequence
  Synthetic
  misc_feature (22)..(23): n is a, c, g, or t
gcagcggcctgaaaaggcaamnnctggtctcttctgcggtcatg

SEQ ID NO: 135 - DNA, 44 bp, Artificial Sequence
  Synthetic
  misc_feature (22)..(23): n is a, c, g, or t
gaccgcagaagagaccaggtgnnkccttttcaggccgctgctcc

SEQ ID NO: 136 - DNA, 44 bp, Artificial Sequence
  Synthetic
  misc_feature (22)..(23): n is a, c, g, or t
ggagcagcggcctgaaaaggmnncacctggtctcttctgcggtc

SEQ ID NO: 137 - DNA, 44 bp, Artificial Sequence
  Synthetic
  misc_feature (21)..(22): n is a, c, g, or t
gcagaagagaccaggtgttgnnktttcaggccgctgctccgctc

SEQ ID NO: 138 - DNA, 44 bp, Artificial Sequence
  Synthetic
  misc_feature (23)..(24): n is a, c, g, or t
gagcggagcagcggcctgaaamnncaacacctggtctcttctgc

SEQ ID NO: 139 - DNA, 44 bp, Artificial Sequence
  Synthetic
  misc_feature (21)..(22): n is a, c, g, or t
gaagagaccaggtgttgcctnnkcaggccgctgctccgctcaac

SEQ ID NO: 140 - DNA, 44 bp, Artificial Sequence
  Synthetic
  misc_feature (23)..(24): n is a, c, g, or t
gttgagcggagcagcggcctgmnnaggcaacacctggtctcttc

SEQ ID NO: 141 - DNA, 44 bp, Artificial Sequence
  Synthetic
  misc_feature (21)..(22): n is a, c, g, or t
gagaccaggtgttgccttttnnkgccgctgctccgctcaactac

SEQ ID NO: 142 - DNA, 44 bp, Artificial Sequence
  Synthetic
  misc_feature (23)..(24): n is a, c, g, or t
gtagttgagcggagcagcggcmnnaaaaggcaacacctggtctc

SEQ ID NO: 143 - DNA, 43 bp, Artificial Sequence
  Synthetic
  misc_feature (22)..(23): n is a, c, g, or t
gaccaggtgttgccttttcagnnkgctgctccgctcaactacc

SEQ ID NO: 144 - DNA, 43 bp, Artificial Sequence
  Synthetic
  misc_feature (21)..(22): n is a, c, g, or t
ggtagttgagcggagcagcmnnctgaaaaggcaacacctggtc

SEQ ID NO: 145 - DNA, 47 bp, Artificial Sequence
  Synthetic
  misc_feature (23)..(24): n is a, c, g, or t
ccaggtgttgccttttcaggccnnkgctccgctcaactaccattacg

SEQ ID NO: 146 - DNA, 47 bp, Artificial Sequence
  Synthetic
  misc_feature (24)..(25): n is a, c, g, or t
cgtaatggtagttgagcggagcmnnggcctgaaaaggcaacacctgg

SEQ ID NO: 147 - DNA, 45 bp, Artificial Sequence
  Synthetic
  misc_feature (22)..(23): n is a, c, g, or t
gtgttgccttttcaggccgctnnkccgctcaactaccattacgcg

SEQ ID NO: 148 - DNA, 45 bp, Artificial Sequence
  Synthetic
  misc_feature (23)..(24): n is a, c, g, or t
cgcgtaatggtagttgagcggmnnagcggcctgaaaaggcaacac

SEQ ID NO: 149 - DNA, 46 bp, Artificial Sequence
  Synthetic
  misc_feature (23)..(24): n is a, c, g, or t
gttgccttttcaggccgctgctnnkctcaactaccattacgcgtac

SEQ ID NO: 150 - DNA, 46 bp, Artificial Sequence
  Synthetic
  misc_feature (23)..(24): n is a, c, g, or t
gtacgcgtaatggtagttgagmnnagcagcggcctgaaaaggcaac

SEQ ID NO: 151 - DNA, 44 bp, Artificial Sequence
  Synthetic
  misc_feature (22)..(23): n is a, c, g, or t
ccttttcaggccgctgctccgnnkaactaccattacgcgtaccg

SEQ ID NO: 152 - DNA, 44 bp, Artificial Sequence
  Synthetic
  misc_feature (22)..(23): n is a, c, g, or t
cggtacgcgtaatggtagttmnncggagcagcggcctgaaaagg

SEQ ID NO: 153 - DNA, 42 bp, Artificial Sequence
  Synthetic
  misc_feature (19)..(20): n is a, c, g, or t
caggccgctgctccgctcnnktaccattacgcgtaccgcctc

SEQ ID NO: 154 - DNA, 42 bp, Artificial Sequence
  Synthetic
  misc_feature (23)..(24): n is a, c, g, or t
gaggcggtacgcgtaatggtamnngagcggagcagcggcctg

SEQ ID NO: 155 - DNA, 45 bp, Artificial Sequence
  Synthetic
  misc_feature (22)..(23): n is a, c, g, or t
caggccgctgctccgctcaacnnkcattacgcgtaccgcctcgac

SEQ ID NO: 156 - DNA, 45 bp, Artificial Sequence
  Synthetic
  misc_feature (23)..(24): n is a, c, g, or t
gtcgaggcggtacgcgtaatgmnngttgagcggagcagcggcctg

SEQ ID NO: 157 - DNA, 78 bp, Artificial Sequence
  Synthetic
ctcgagggagccgagaaagtgadgcrsytctatrtcttkdscgacrtcvtcgwgvtcccagtcgtggaatggcggtgg

SEQ ID NO: 158 - DNA, 78 bp, Artificial Sequence
  Synthetic
ctcgagggagccgagaaagtgadgcrsytcvtcrtcttkdscgacrtcvtcgwgvtcccagtcgtggaatggcggtgg

SEQ ID NO: 159 - DNA, 78 bp, Artificial Sequence
  Synthetic
ccaccgccattccacgactgggabcwcgabgaygtcgshmaagayatagarsygchtcactttctcggctccctcgag

SEQ ID NO: 160 - DNA, 78 bp, Artificial Sequence
  Synthetic
ccaccgccattccacgactgggabcwcgabgaygtcgshmaagaygabgarsygchtcactttctcggctccctcgag

SEQ ID NO: 161 - DNA, 84 bp, Artificial Sequence
  Synthetic
cggccaccgccattccacgactggtagcwcgabaaygtcgshaaaaayatacaasygchtcactttctcggctccctcgagctg

SEQ ID NO: 162 - DNA, 51 bp, Artificial Sequence
  Synthetic
aatctctcatctaagaggctggatcctaggatggctctcgtggattacggc

SEQ ID NO: 163 - DNA, 52 bp, Artificial Sequence
  Synthetic
tggccaatccagaagatggacaagtctagactactcttcgtcgtgccgccag

SEQ ID NO: 164 - DNA, 27 bp, Artificial Sequence
  Synthetic
ctaccagtcgtggaatggcggtggccg

SEQ ID NO: 165 - DNA, 63 bp, Artificial Sequence
  Synthetic
gtctcggaggttccggtgtggabsgbcmrgtgcaaswscgtggctgcactgggtcgggagatg

SEQ ID NO: 166 - DNA, 63 bp, Artificial Sequence
  Synthetic
gtctcggaggttccggtgtggcwsgbcmrgtgcaaswscgtggctgcactgggtcgggagatg

SEQ ID NO: 167 - DNA, 63 bp, Artificial Sequence
  Synthetic
gtctcggaggttccggtgtggabsgbcmrgtgcaasmatgtggctgcactgggtcgggagatg

SEQ ID NO: 168 - DNA, 63 bp, Artificial Sequence
  Synthetic
gtctcggaggttccggtgtggcwsgbcmrgtgcaasmatgtggctgcactgggtcgggagatg

SEQ ID NO: 169 - DNA, 51 bp, Artificial Sequence; identical to SEQ ID NO: 162
  Synthetic

SEQ ID NO: 170 - DNA, 52 bp, Artificial Sequence; identical to SEQ ID NO: 163
  Synthetic

SEQ ID NO: 171 - DNA, 25 bp, Artificial Sequence
  Synthetic
caccggaacctccgagacttccgtt

SEQ ID NO: 172 - DNA, 2601 bp, Artificial Sequence
  Synthetic
atggctctcgtggattacggcaagcttttcgaggatctgaaccagataagcatgggtgtactggatcgggtagagttttcagaggtgatggtgatccacaggatgtatgtgaggctagctgatctgaatgtggggcagctcgagggagccgagaaagtgaagcacttgtatattttttgcgacgttatcgagctaccagtcgtggaatggcggtggccgccgcaaataccaggatcggtgacggtgatcatattgtgtcgtcttcttcaatggccaactgatgggaggcagtcggacaccgagctccacctgacattcatgaagttgcatgccatacaacgagaggaaaatcggtgggagataaccgcagcagatggcatgaactggggagtttacatacacgcagaggaagtacaggttggcgtgctgacaatgtcatggtcttcggtacttagagtttcggcacttcgctctgttataacctccggctttcgcgccgttagtgtgtttgaggtaccgggaagtgtaaggtccacccttggagctactttaaggcccgatcacgccttatatagtacaactatgcaagccacacccaacgcatcgcatattagtgcttttaaccttcgcatagtttccccgtcggcatatcgtgtttgtcctctccaaaatgacacagatacctacttaggtattccagcagacgtggcggcagttcttccagtagacgtggtgactgatcctaacatcttgctgggcatgcagacaacggtacacattgcggagctagtcaaggcatgtcatccgtcacccgatgttgtgagcgctgtaggggagcacctgaactggctcaacaaactcttactcccacttaaggaatcgactcagttgcaaggaagcgagtcgtacaaggagtgccttgcactcttgggtcgtgttcacgctgcgatgaagatggtgagaattggcttagtagtgccccagctgcaatacagaatgtacggtagcctcatcaaccaaatggcccaagtagcacaaaactacgaccgagaattcaagcaattcaaattattcatcatccaaaatcaaatccttggcagctatttgctgcagcagaacagggcatttgctgagagggagctgcagatggagagctttcatgctgctgtcatttctcaaagaagggaggagttggacaatacattcgcaaagatggaccgattgagcgggcaaatggaggcagagagtagtgcaatggagcaagccaaaaaggaaatggacgaaggattgaggcagttccagaataggcaagttgcgaacgccctctttgccgttcttagcgctgtagctcagattgggcttgcattccttacggctggtgcaacggctcctggagctgtggcgtcggcggggcaagctgtgagcatagcaggtcaggcggcgcaaggtctgcgaagggtggtggaaattctagagcagctggaggctgtgatggaggttgtggctgctgtgaaggacctcgtggattcattggaacaggtaggtcagattgtggacgcaccggtgatgccggaattgccctcagaggcggactggtccatttttgtgaacgaggtggaggccgtggcagagggcatgccaacggaagtctcggaggttccggtgtggagggccaagtgcaagaatgtggctgcactgggtcgggagatgagcatcacggcagtacagatgtcggagctgcagtatgacatctgggtgcaaggcatgatgcgggatatggctcgaagccaggcagacaggctggccgcaattcaacccgcggaccttaccaactatttggagatggctacccagatggatatgcggactacgaggatgctgctggggctcctcaacatattgcgcatccagaatgcggcgctcaggtacgagtatcttctaatgcccacggagctcacaacatggccactgggtatggataccgtgggtgacttgctcatcgcgcaggagaatgctgcactgataggattaatgcagctagggccctcatctgatttcacgagcaggcatgtggtgaaagacatacctgtgaacttgctgctcgatggcgaggattgggagtttgagattcctgtgcaagctggcatgtccagcttcccttccagctggtctcgcgtccgtattcggcacctggagatgcactttgtgaaggaggccagcggtattggtggtgagattatccaccagcctaccacccagactgggaccgtttacatccttctgcagggttccactatcttccatgaccgcagaagagaccaggtgttgccttttcaggccgctgctccgctcaactaccattacgcgtaccgcctcgacaccggcgactccactctcacaaacgaaccctctgaacagtttgccaacaagttcatgcagatgacacccttcacccgttggaggcttcgtctgtctgcgtccgcaaaagagaatgcaggattagcctttcccacggctacagcacttgactccactacccagattgtcatcactttccatgttacggccatcagacaaattgactggcggcacgacgaagag

SEQ ID NO: 173 - DNA, 2601 bp, Artificial Sequence
  Synthetic
atggctctcgtggattacggcaagcttttcgaggatctgaaccagataagcatgggtgtactggatcgggtagagttttcagaggtgatggtgatccacaggatgtatgtgaggctagctgatctgaatgtggggcagctcgagggagccgagaaagtgaagcacttgtatattttttgcgacgttgtcgagctaccagtcgtggaatggcggtggccgccgcaaataccaggatcggtgacggtgatcatattgtgtcgtcttcttcaatggccaactgatgggaggcagtcggacaccgagctccacctgacattcatgaagttgcatgccatacaacgagaggaaaatcggtgggagataaccgcagcagatggcatgaactggggagtttacatacacgcagaggaagtacaggttggcgtgctgacaatgtcatggtcttcggtacttagagtttcggcacttcgctctgttataacctccggctttcgcgccgttagtgtgtttgaggtaccgggaagtgtaaggtccacccttggagctactttaaggcccgatcacgccttatatagtacaactatgcaagccacacccaacgcatcgcatattagtgcttttaaccttcgcatagtttccccgtcggcatatcgtgtttgtcctctccaaaatgacacagatacctacttaggtattccagcagacgtggcggcagttcttccagtagacgtggtgactgatcctaacatcttgctgggcatgcagacaacggtacacattgcggagctagtcaaggcatgtcatccgtcacccgatgttgtgagcgctgtaggggagcacctgaactggctcaacaaactcttactcccacttaaggaatcgactcagttgcaaggaagcgagtcgtacaaggagtgccttgcactcttgggtcgtgttcacgctgcgatgaagatggtgagaattggcttagtagtgccccagctgcaatacagaatgtacggtagcctcatcaaccaaatggcccaagtagcacaaaactacgaccgagaattcaagcaattcaaattattcatcatccaaaatcaaatccttggcagctatttgctgcagcagaacagggcatttgctgagagggagctgcagatggagagctttcatgctgctgtcatttctcaaagaagggaggagttggacaatacattcgcaaagatggaccgattgagcgggcaaatggaggcagagagtagtgcaatggagcaagccaaaaaggaaatggacgaaggattgaggcagttccagaataggcaagttgcgaacgccctctttgccgttcttagcgctgtagctcagattgggcttgcattccttacggctggtgcaacggctcctggagctgtggcgtcggcggggcaagctgtgagcatagcaggtcaggcggcgcaaggtctgcgaagggtggtggaaattctagagcagctggaggctgtgatggaggttgtggctgctgtgaaggacctcgtggattcattggaacaggtaggtcagattgtggacgcaccggtgatgccggaattgccctcagaggcggactggtccatttttgtgaacgaggtggaggccgtggcagagggcatgccaacggaagtctcggaggttccggtgtggagggccaagtgcaagaatgtggctgcactgggtcgggagatgagcatcacggcagtacagatgtcggagctgcagtatgacatctgggtgcaaggcatgatgcgggatatggctcgaagccaggcagacaggctggccgcaattcaacccgcggaccttaccaactatttggagatggctacccagatggatatgcggactacgaggatgctgctggggctcctcaacatattgcgcatccagaatgcggcgctcaggtacgagtatcttctaatgcccacggagctcacaacatggccactgggtatggataccgtgggtgacttgctcatcgcgcaggagaatgctgcactgataggattaatgcagctagggccctcatctgatttcacgagcaggcatgtggtgaaagacatacctgtgaacttgctgctcgatggcgaggattgggagtttgagattcctgtgcaagctggcatgtccagcttcccttccagctggtctcgcgtccgtattcggcacctggagatgcactttgtgaaggaggccagcggtattggtggtgagattatccaccagcctaccacccagactgggaccgtttacatccttctgcagggttccactatcttccatgaccgcagaagagaccaggtgttgccttttcaggccgctgctccgctcaactaccattacgcgtaccgcctcgacaccggcgactccactctcacaaacgaaccctctgaacagtttgccaacaagttcatgcagatgacacccttcacccgttggaggcttcgtctgtctgcgtccgcaaaagagaatgcaggattagcctttcccacggctacagcacttgactccactacccagattgtcatcactttccatgttacggccatcagacaaattgactggcggcacgacgaagag

SEQ ID NO: 174 - DNA, 2601 bp, Artificial Sequence
  Synthetic
atggctctcgtggattacggcaagcttttcgaggatctgaaccagataagcatgggtgtactggatcgggtagagttttcagaggtgatggtgatccacaggatgtatgtgaggctagctgatctgaatgtggggcagctcgagggagccgagaaagtgaagcacttgtatatttttagcgacattatcgagctaccagtcgtggaatggcggtggccgccgcaaataccaggatcggtgacggtgatcatattgtgtcgtcttcttcaatggccaactgatgggaggcagtcggacaccgagctccacctgacattcatgaagttgcatgccatacaacgagaggaaaatcggtgggagataaccgcagcagatggcatgaactggggagtttacatacacgcagaggaagtacaggttggcgtgctgacaatgtcatggtcttcggtacttagagtttcggcacttcgctctgttataacctccggctttcgcgccgttagtgtgtttgaggtaccgggaagtgtaaggtccacccttggagctactttaaggcccgatcacgccttatatagtacaactatgcaagccacacccaacgcatcgcatattagtgcttttaaccttcgcatagtttccccgtcggcatatcgtgtttgtcctctccaaaatgacacagatacctacttaggtattccagcagacgtggcggcagttcttccagtagacgtggtgactgatcctaacatcttgctgggcatgcagacaacggtacacattgcggagctagtcaaggcatgtcatccgtcacccgatgttgtgagcgctgtaggggagcacctgaactggctcaacaaactcttactcccacttaaggaatcgactcagttgcaaggaagcgagtcgtacaaggagtgccttgcactcttgggtcgtgttcacgctgcgatgaagatggtgagaattggcttagtagtgccccagctgcaatacagaatgtacggtagcctcatcaaccaaatggcccaagtagcacaaaactacgaccgagaattcaagcaattcaaattattcatcatccaaaatcaaatccttggcagctatttgctgcagcagaacagggcatttgctgagagggagctgcagatggagagctttcatgctgctgtcatttctcaaagaagggaggagttggacaatacattcgcaaagatggaccgattgagcgggcaaatggaggcagagagtagtgcaatggagcaagccaaaaaggaaatggacgaaggattgaggcagttccagaataggcaagttgcgaacgccctctttgccgttcttagcgctgtagctcagattgggcttgcattccttacggctggtgcaacggctcctggagctgtggcgtcggcggggcaagctgtgagcatagcaggtcaggcggcgcaaggtctgcgaagggtggtggaaattctagagcagctggaggctgtgatggaggttgtggctgctgtgaaggacctcgtggattcattggaacaggtaggtcagattgtggacgcaccggtgatgccggaattgccctcagaggcggactggtccatttttgtgaacgaggtggaggccgtggcagagggcatgccaacggaagtctcggaggttccggtgtggagggccaagtgcaagaatgtggctgcactgggtcgggagatgagcatcacggcagtacagatgtcggagctgcagtatgacatctgggtgcaaggcatgatgcgggatatggctcgaagccaggcagacaggctggccgcaattcaacccgcggaccttaccaactatttggagatggctacccagatggatatgcggactacgaggatgctgctggggctcctcaacatattgcgcatccagaatgcggcgctcaggtacgagtatcttctaatgcccacggagctcacaacatggccactgggtatggataccgtgggtgacttgctcatcgcgcaggagaatgctgcactgataggattaatgcagctagggccctcatctgatttcacgagcaggcatgtggtgaaagacatacctgtgaacttgctgctcgatggcgaggattgggagtttgagattcctgtgcaagctggcatgtccagcttcccttccagctggtctcgcgtccgtattcggcacctggagatgcactttgtgaaggaggccagcggtattggtggtgagattatccaccagcctaccacccagactgggaccgtttacatccttctgcagggttccactatcttccatgaccgcagaagagaccaggtgttgccttttcaggccgctgctccgctcaactaccattacgcgtaccgcctcgacaccggcgactccactctcacaaacgaaccctctgaacagtttgccaacaagttcatgcagatgacacccttcacccgttggaggcttcgtctgtctgcgtccgcaaaagagaatgcaggattagcctttcccacggctacagcacttgactccactacccagattgtcatcactttccatgttacggccatcagacaaattgactggcggcacgacgaagag

SEQ ID NO: 175 - DNA, 2601 bp, Artificial Sequence
  Synthetic
atggctctcgtggattacggcaagcttttcgaggatctgaaccagataagcatgggtgtactggatcgggtagagttttcagaggtgatggtgatccacaggatgtatgtgaggctagctgatctgaatgtggggcagctcgagggagccgagaaagtgaagcacttgtatatttttaccgacgttctcgagctaccagtcgtggaatggcggtggccgccgcaaataccaggatcggtgacggtgatcatattgtgtcgtcttcttcaatggccaactgatgggaggcagtcggacaccgagctccacctgacattcatgaagttgcatgccatacaacgagaggaaaatcggtgggagataaccgcagcagatggcatgaactggggagtttacatacacgcagaggaagtacaggttggcgtgctgacaatgtcatggtcttcggtacttagagtttcggcacttcgctctgttataacctccggctttcgcgccgttagtgtgtttgaggtaccgggaagtgtaaggtccacccttggagctactttaaggcccgatcacgccttatatagtacaactatgcaagccacacccaacgcatcgcatattagtgcttttaaccttcgcatagtttccccgtcggcatatcgtgtttgtcctctccaaaatgacacagatacctacttaggtattccagcagacgtggcggcagttcttccagtagacgtggtgactgatcctaacatcttgctgggcatgcagacaacggtacacattgcggagctagtcaaggcatgtcatccgtcacccgatgttgtgagcgctgtaggggagcacctgaactggctcaacaaactcttactcccacttaaggaatcgactcagttgcaaggaagcgagtcgtacaaggagtgccttgcactcttgggtcgtgttcacgctgcgatgaagatggtgagaattggcttagtagtgccccagctgcaatacagaatgtacggtagcctcatcaaccaaatggcccaagtagcacaaaactacgaccgagaattcaagcaattcaaattattcatcatccaaaatcaaatccttggcagctatttgctgcagcagaacagggcatttgctgagagggagctgcagatggagagctttcatgctgctgtcatttctcaaagaagggaggagttggacaatacattcgcaaagatggaccgattgagcgggcaaatggaggcagagagtagtgcaatggagcaagccaaaaaggaaatggacgaaggattgaggcagttccagaataggcaagttgcgaacgccctctttgccgttcttagcgctgtagctcagattgggcttgcattccttacggctggtgcaacggctcctggagctgtggcgtcggcggggcaagctgtgagcatagcaggtcaggcggcgcaaggtctgcgaagggtggtggaaattctagagcagctggaggctgtgatggaggttgtggctgctgtgaaggacctcgtggattcattggaacaggtaggtcagattgtggacgcaccggtgatgccggaattgccctcagaggcggactggtccatttttgtgaacgaggtggaggccgtggcagagggcatgccaacggaagtctcggaggttccggtgtggagggccaagtgcaagaatgtggctgcactgggtcgggagatgagcatcacggcagtacagatgtcggagctgcagtatgacatctgggtgcaaggcatgatgcgggatatggctcgaagccaggcagacaggctggccgcaattcaacccgcggaccttaccaactatttggagatggctacccagatggatatgcggactacgaggatgctgctggggctcctcaacatattgcgcatccagaatgcggcgctcaggtacgagtatcttctaatgcccacggagctcacaacatggccactgggtatggataccgtgggtgacttgctcatcgcgcaggagaatgctgcactgataggattaatgcagctagggccctcatctgatttcacgagcaggcatgtggtgaaagacatacctgtgaacttgctgctcgatggcgaggattgggagtttgagattcctgtgcaagctggcatgtccagcttcccttccagctggtctcgcgtccgtattcggcacctggagatgcactttgtgaaggaggccagcggtattggtggtgagattatccaccagcctaccacccagactgggaccgtttacatccttctgcagggttccactatcttccatgaccgcagaagagaccaggtgttgccttttcaggccgctgctccgctcaactaccattacgcgtaccgcctcgacaccggcgactccactctcacaaacgaaccctctgaacagtttgccaacaagttcatgcagatgacacccttcacccgttggaggcttcgtctgtctgcgtccgcaaaagagaatgcaggattagcctttcccacggctacagcacttgactccactacccagattgtcatcactttccatgttacggccatcagacaaattgactggcggcacgacgaagag

SEQ ID NO: 176 - DNA, 2601 bp, Artificial Sequence
  Synthetic
atggctctcgtggattacggcaagcttttcgaggatctgaaccagataagcatgggtgtactggatcgggtagagttttcagaggtgatggtgatccacaggatgtatgtgaggctagctgatctgaatgtggggcagctcgagggagccgagaaagtgaagcacttgtatgtttttgccgacattatcgtgctaccagtcgtggaatggcggtggccgccgcaaataccaggatcggtgacggtgatcatattgtgtcgtcttcttcaatggccaactgatgggaggcagtcggacaccgagctccacctgacattcatgaagttgcatgccatacaacgagaggaaaatcggtgggagataaccgcagcagatggcatgaactggggagtttacatacacgcagaggaagtacaggttggcgtgctgacaatgtcatggtcttcggtacttagagtttcggcacttcgctctgttataacctccggctttcgcgccgttagtgtgtttgaggtaccgggaagtgtaaggtccacccttggagctactttaaggcccgatcacgccttatatagtacaactatgcaagccacacccaacgcatcgcatattagtgcttttaaccttcgcatagtttccccgtcggcatatcgtgtttgtcctctccaaaatgacacagatacctacttaggtattccagcagacgtggcggcagttcttccagtagacgtggtgactgatcctaacatcttgctgggcatgcagacaacggtacacattgcggagctagtcaaggcatgtcatccgtcacccgatgttgtgagcgctgtaggggagcacctgaactggctcaacaaactcttactcccacttaaggaatcgactcagttgcaaggaagcgagtcgtacaaggagtgccttgcactcttgggtcgtgttcacgctgcgatgaagatggtgagaattggcttagtagtgccccagctgcaatacagaatgtacggtagcctcatcaaccaaatggcccaagtagcacaaaactacgaccgagaattcaagcaattcaaattattcatcatccaaaatcaaatccttggcagctatttgctgcagcagaacagggcatttgctgagagggagctgcagatggagagctttcatgctgctgtcatttctcaaagaagggaggagttggacaatacattcgcaaagatggaccgattgagcgggcaaatggaggcagagagtagtgcaatggagcaagccaaaaaggaaatggacgaaggattgaggcagttccagaataggcaagttgcgaacgccctctttgccgttcttagcgctgtagctcagattgggcttgcattccttacggctggtgcaacggctcctggagctgtggcgtcggcggggcaagctgtgagcatagcaggtcaggcggcgcaaggtctgcgaagggtggtggaaattctagagcagctggaggctgtgatggaggttgtggctgctgtgaaggacctcgtggattcattggaacaggtaggtcagattgtggacgcaccggtgatgccggaattgccctcagaggcggactggtccatttttgtgaacgaggtggaggccgtggcagagggcatgccaacggaagtctcggaggttccggtgtggagggccaagtgcaagaatgtggctgcactgggtcgggagatgagcatcacggcagtacagatgtcggagctgcagtatgacatctgggtgcaaggcatgatgcgggatatggctcgaagccaggcagacaggctggccgcaattcaacccgcggaccttaccaactatttggagatggctacccagatggatatgcggactacgaggatgctgctggggctcctcaacatattgcgcatccagaatgcggcgctcaggtacgagtatcttctaatgcccacggagctcacaacatggccactgggtatggataccgtgggtgacttgctcatcgcgcaggagaatgctgcactgataggattaatgcagctagggccctcatctgatttcacgagcaggcatgtggtgaaagacatacctgtgaacttgctgctcgatggcgaggattgggagtttgagattcctgtgcaagctggcatgtccagcttcccttccagctggtctcgcgtccgtattcggcacctggagatgcactttgtgaaggaggccagcggtattggtggtgagattatccaccagcctaccacccagactgggaccgtttacatccttctgcagggttccactatcttccatgaccgcagaagagaccaggtgttgccttttcaggccgctgctccgctcaactaccattacgcgtaccgcctcgacaccggcgactccactctcacaaacgaaccctctgaacagtttgccaacaagttcatgcagatgacacccttcacccgttggaggcttcgtctgtctgcgtccgcaaaagagaatgcaggattagcctttcccacggctacagcacttgactccactacccagattgtcatcactttccatgttacggccatcagacaaattgactggcggcacgacgaagag

SEQ ID NO: 177 - DNA, 2601 bp, Artificial Sequence
  Synthetic
atggctctcgtggattacggcaagcttttcgaggatctgaaccagataagcatgggtgtactggatcgggtagagttttcagaggtgatggtgatccacaggatgtatgtgaggctagctgatctgaatgtggggcagctcgagggagccgagaaagtgaagcacttgtatgtttttgccgacgttatcgagctaccagtcgtggaatggcggtggccgccgcaaataccaggatcggtgacggtgatcatattgtgtcgtcttcttcaatggccaactgatgggaggcagtcggacaccgagctccacctgacattcatgaagttgcatgccatacaacgagaggaaaatcggtgggagataaccgcagcagatggcatgaactggggagtttacatacacgcagaggaagtacaggttggcgtgctgacaatgtcatggtcttcggtacttagagtttcggcacttcgctctgttataacctccggctttcgcgccgttagtgtgtttgaggtaccgggaagtgtaaggtccacccttggagctactttaaggcccgatcacgccttatatagtacaactatgcaagccacacccaacgcatcgcatattagtgcttttaaccttcgcatagtttccccgtcggcatatcgtgtttgtcctctccaaaatgacacagatacctacttaggtattccagcagacgtggcggcagttcttccagtagacgtggtgactgatcctaacatcttgctgggcatgcagacaacggtacacattgcggagctagtcaaggcatgtcatccgtcacccgatgttgtgagcgctgtaggggagcacctgaactggctcaacaaactcttactcccacttaaggaatcgactcagttgcaaggaagcgagtcgtacaaggagtgccttgcactcttgggtcgtgttcacgctgcgatgaagatggtgagaattggcttagtagtgccccagctgcaatacagaatgtacggtagcctcatcaaccaaatggcccaagtagcacaaaactacgaccgagaattcaagcaattcaaattattcatcatccaaaatcaaatccttggcagctatttgctgcagcagaacagggcatttgctgagagggagctgcagatggagagctttcatgctgctgtcatttctcaaagaagggaggagttggacaatacattcgcaaagatggaccgattgagcgggcaaatggaggcagagagtagtgcaatggagcaagccaaaaaggaaatggacgaaggattgaggcagttccagaataggcaagttgcgaacgccctctttgccgttcttagcgctgtagctcagattgggcttgcattccttacggctggtgcaacggctcctggagctgtggcgtcggcggggcaagctgtgagcatagcaggtcaggcggcgcaaggtctgcgaagggtggtggaaattctagagcagctggaggctgtgatggaggttgtggctgctgtgaaggacctcgtggattcattggaacaggtaggtcagattgtggacgcaccggtgatgccggaattgccctcagaggcggactggtccatttttgtgaacgaggtggaggccgtggcagagggcatgccaacggaagtctcggaggttccggtgtggagggccaagtgcaagaatgtggctgcactgggtcgggagatgagcatcacggcagtacagatgtcggagctgcagtatgacatctgggtgcaaggcatgatgcgggatatggctcgaagccaggcagacaggctggccgcaattcaacccgcggaccttaccaactatttggagatggctacccagatggatatgcggactacgaggatgctgctggggctcctcaacatattgcgcatccagaatgcggcgctcaggtacgagtatcttctaatgcccacggagctcacaacatggccactgggtatggataccgtgggtgacttgctcatcgcgcaggagaatgctgcactgataggattaatgcagctagggccctcatctgatttcacgagcaggcatgtggtgaaagacatacctgtgaacttgctgctcgatggcgaggattgggagtttgagattcctgtgcaagctggcatgtccagcttcccttccagctggtctcgcgtccgtattcggcacctggagatgcactttgtgaaggaggccagcggtattggtggtgagattatccaccagcctaccacccagactgggaccgtttacatccttctgcagggttccactatcttccatgaccgcagaagagaccaggtgttgccttttcaggccgctgctccgctcaactaccattacgcgtaccgcctcgacaccggcgactccactctcacaaacgaaccctctgaacagtttgccaacaagttcatgcagatgacacccttcacccgttggaggcttcgtctgtctgcgtccgcaaaagagaatgcaggattagcctttcccacggctacagcacttgactccactacccagattgtcatcactttccatgttacggccatcagacaaattgactggcggcacgacgaagag

SEQ ID NO: 178 - DNA, 2601 bp, Artificial Sequence
  Synthetic
atggctctcgtggattacggcaagcttttcgaggatctgaaccagataagcatgggtgtactggatcgggtagagttttcagaggtgatggtgatccacaggatgtatgtgaggctagctgatctgaatgtggggcagctcgagggagccgagaaagtgaagcacttgtatgtttttggcgacgttatcgagctaccagtcgtggaatggcggtggccgccgcaaataccaggatcggtgacggtgatcatattgtgtcgtcttcttcaatggccaactgatgggaggcagtcggacaccgagctccacctgacattcatgaagttgcatgccatacaacgagaggaaaatcggtgggagataaccgcagcagatggcatgaactggggagtttacatacacgcagaggaagtacaggttggcgtgctgacaatgtcatggtcttcggtacttagagtttcggcacttcgctctgttataacctccggctttcgcgccgttagtgtgtttgaggtaccgggaagtgtaaggtccacccttggagctactttaaggcccgatcacgccttatatagtacaactatgcaagccacacccaacgcatcgcatattagtgcttttaaccttcgcatagtttccccgtcggcatatcgtgtttgtcctctccaaaatgacacagatacctacttaggtattccagcagacgtggcggcagttcttccagtagacgtggtgactgatcctaacatcttgctgggcatgcagacaacggtacacattgcggagctagtcaaggcatgtcatccgtcacccgatgttgtgagcgctgtaggggagcacctgaactggctcaacaaactcttactcccacttaaggaatcgactcagttgcaaggaagcgagtcgtacaaggagtgccttgcactcttgggtcgtgttcacgctgcgatgaagatggtgagaattggcttagtagtgccccagctgcaatacagaatgtacggtagcctcatcaaccaaatggcccaagtagcacaaaactacgaccgagaattcaagcaattcaaattattcatcatccaaaatcaaatccttggcagctatttgctgcagcagaacagggcatttgctgagagggagctgcagatggagagctttcatgctgctgtcatttctcaaagaagggaggagttggacaatacattcgcaaagatggaccgattgagcgggcaaatggaggcagagagtagtgcaatggagcaagccaaaaaggaaatggacgaaggattgaggcagttccagaataggcaagttgcgaacgccctctttgccgttcttagcgctgtagctcagattgggcttgcattccttacggctggtgcaacggctcctggagctgtggcgtcggcggggcaagctgtgagcatagcaggtcaggcggcgcaaggtctgcgaagggtggtggaaattctagagcagctggaggctgtgatggaggttgtggctgctgtgaaggacctcgtggattcattggaacaggtaggtcagattgtggacgcaccggtgatgccggaattgccctcagaggcggactggtccatttttgtgaacgaggtggaggccgtggcagagggcatgccaacggaagtctcggaggttccggtgtggagggccaagtgcaagaatgtggctgcactgggtcgggagatgagcatcacggcagtacagatgtcggagctgcagtatgacatctgggtgcaaggcatgatgcgggatatggctcgaagccaggcagacaggctggccgcaattcaacccgcggaccttaccaactatttggagatggctacccagatggatatgcggactacgaggatgctgctggggctcctcaacatattgcgcatccagaatgcggcgctcaggtacgagtatcttctaatgcccacggagctcacaacatggccactgggtatggataccgtgggtgacttgctcatcgcgcaggagaatgctgcactgataggattaatgcagctagggccctcatctgatttcacgagcaggcatgtggtgaaagacatacctgtgaacttgctgctcgatggcgaggattgggagtttgagattcctgtgcaagctggcatgtccagcttcccttccagctggtctcgcgtccgtattcggcacctggagatgcactttgtgaaggaggccagcggtattggtggtgagattatccaccagcctaccacccagactgggaccgtttacatccttctgcagggttccactatcttccatgaccgcagaagagaccaggtgttgccttttcaggccgctgctccgctcaactaccattacgcgtaccgcctcgacaccggcgactccactctcacaaacgaaccctctgaacagtttgccaacaagttcatgcagatgacacccttcacccgttggaggcttcgtctgtctgcgtccgcaaaagagaatgcaggattagcctttcccacggctacagcacttgactccactacccagattgtcatcactttccatgttacggccatcagacaaattgactggcggcacgacgaagag

SEQ ID NO: 179 - DNA, 2601 bp, Artificial Sequence
  Synthetic
atggctctcgtggattacggcaagcttttcgaggatctgaaccagataagcatgggtgtactggatcgggtagagttttcagaggtgatggtgatccacaggatgtatgtgaggctagctgatctgaatgtggggcagctcgagggagccgagaaagtgaagcacttgtatgttttttccgacgttatcgagctaccagtcgtggaatggcggtggccgccgcaaataccaggatcggtgacggtgatcatattgtgtcgtcttcttcaatggccaactgatgggaggcagtcggacaccgagctccacctgacattcatgaagttgcatgccatacaacgagaggaaaatcggtgggagataaccgcagcagatggcatgaactggggagtttacatacacgcagaggaagtacaggttggcgtgctgacaatgtcatggtcttcggtacttagagtttcggcacttcgctctgttataacctccggctttcgcgccgttagtgtgtttgaggtaccgggaagtgtaaggtccacccttggagctactttaaggcccgatcacgccttatatagtacaactatgcaagccacacccaacgcatcgcatattagtgcttttaaccttcgcatagtttccccgtcggcatatcgtgtttgtcctctccaaaatgacacagatacctacttaggtattccagcagacgtggcggcagttcttccagtagacgtggtgactgatcctaacatcttgctgggcatgcagacaacggtacacattgcggagctagtcaaggcatgtcatccgtcacccgatgttgtgagcgctgtaggggagcacctgaactggctcaacaaactcttactcccacttaaggaatcgactcagttgcaaggaagcgagtcgtacaaggagtgccttgcactcttgggtcgtgttcacgctgcgatgaagatggtgagaattggcttagtagtgccccagctgcaatacagaatgtacggtagcctcatcaaccaaatggcccaagtagcacaaaactacgaccgagaattcaagcaattcaaattattcatcatccaaaatcaaatccttggcagctatttgctgcagcagaacagggcatttgctgagagggagctgcagatggagagctttcatgctgctgtcatttctcaaagaagggaggagttggacaatacattcgcaaagatggaccgattgagcgggcaaatggaggcagagagtagtgcaatggagcaagccaaaaaggaaatggacgaaggattgaggcagttccagaataggcaagttgcgaacgccctctttgccgttcttagcgctgtagctcagattgggcttgcattccttacggctggtgcaacggctcctggagctgtggcgtcggcggggcaagctgtgagcatagcaggtcaggcggcgcaaggtctgcgaagggtggtggaaattctagagcagctggaggctgtgatggaggttgtggctgctgtgaaggacctcgtggattcattggaacaggtaggtcagattgtggacgcaccggtgatgccggaattgccctcagaggcggactggtccatttttgtgaacgaggtggaggccgtggcagagggcatgccaacggaagtctcggaggttccggtgtggagggccaagtgcaagaatgtggctgcactgggtcgggagatgagcatcacggcagtacagatgtcggagctgcagtatgacatctgggtgcaaggcatgatgcgggatatggctcgaagccaggcagacaggctggccgcaattcaacccgcggaccttaccaactatttggagatggctacccagatggatatgcggactacgaggatgctgctggggctcctcaacatattgcgcatccagaatgcggcgctcaggtacgagtatcttctaatgcccacggagctcacaacatggccactgggtatggataccgtgggtgacttgctcatcgcgcaggagaatgctgcactgataggattaatgcagctagggccctcatctgatttcacgagcaggcatgtggtgaaagacatacctgtgaacttgctgctcgatggcgaggattgggagtttgagattcctgtgcaagctggcatgtccagcttcccttccagctggtctcgcgtccgtattcggcacctggagatgcactttgtgaaggaggccagcggtattggtggtgagattatccaccagcctaccacccagactgggaccgtttacatccttctgcagggttccactatcttccatgaccgcagaagagaccaggtgttgccttttcaggccgctgctccgctcaactaccattacgcgtaccgcctcgacaccggcgactccactctcacaaacgaaccctctgaacagtttgccaacaagttcatgcagatgacacccttcacccgttggaggcttcgtctgtctgcgtccgcaaaagagaatgcaggattagcctttcccacggctacagcacttgactccactacccagattgtcatcactttccatgttacggccatcagacaaattgactggcggcacgacgaagag

SEQ ID NO: 180 - DNA, 2601 bp, Artificial Sequence
  Synthetic
atggctctcgtggattacggcaagcttttcgaggatctgaaccagataagcatgggtgtactggatcgggtagagttttcagaggtgatggtgatccacaggatgtatgtgaggctagctgatctgaatgtggggcagctcgagggagccgagaaagtgaagcacttgtatgtttttagcgacgttctcgtgctaccagtcgtggaatggcggtggccgccgcaaataccaggatcggtgacggtgatcatattgtgtcgtcttcttcaatggccaactgatgggaggcagtcggacaccgagctccacctgacattcatgaagttgcatgccatacaacgagaggaaaatcggtgggagataaccgcagcagatggcatgaactggggagtttacatacacgcagaggaagtacaggttggcgtgctgacaatgtcatggtcttcggtacttagagtttcggcacttcgctctgttataacctccggctttcgcgccgttagtgtgtttgaggtaccgggaagtgtaaggtccacccttggagctactttaaggcccgatcacgccttatatagtacaactatgcaagccacacccaacgcatcgcatattagtgcttttaaccttcgcatagtttccccgtcggcatatcgtgtttgtcctctccaaaatgacacagatacctacttaggtattccagcagacgtggcggcagttcttccagtagacgtggtgactgatcctaacatcttgctgggcatgcagacaacggtacacattgcggagctagtcaaggcatgtcatccgtcacccgatgttgtgagcgctgtaggggagcacctgaactggctcaacaaactcttactcccacttaaggaatcgactcagttgcaaggaagcgagtcgtacaaggagtgccttgcactcttgggtcgtgttcacgctgcgatgaagatggtgagaattggcttagtagtgccccagctgcaatacagaatgtacggtagcctcatcaaccaaatggcccaagtagcacaaaactacgaccgagaattcaagcaattcaaattattcatcatccaaaatcaaatccttggcagctatttgctgcagcagaacagggcatttgctgagagggagctgcagatggagagctttcatgctgctgtcatttctcaaagaagggaggagttggacaatacattcgcaaagatggaccgattgagcgggcaaatggaggcagagagtagtgcaatggagcaagccaaaaaggaaatggacgaaggattgaggcagttccagaataggcaagttgcgaacgccctctttgccgttcttagcgctgtagctcagattgggcttgcattccttacggctggtgcaacggctcctggagctgtggcgtcggcggggcaagctgtgagcatagcaggtcaggcggcgcaaggtctgcgaagggtggtggaaattctagagcagctggaggctgtgatggaggttgtggctgctgtgaaggacctcgtggattcattggaacaggtaggtcagattgtggacgcaccggtgatgccggaattgccctcagaggcggactggtccatttttgtgaacgaggtggaggccgtggcagagggcatgccaacggaagtctcggaggttccggtgtggagggccaagtgcaagaatgtggctgcactgggtcgggagatgagcatcacggcagtacagatgtcggagctgcagtatgacatctgggtgcaaggcatgatgcgggatatggctcgaagccaggcagacaggctggccgcaattcaacccgcggaccttaccaactatttggagatggctacccagatggatatgcggactacgaggatgctgctggggctcctcaacatattgcgcatccagaatgcggcgctcaggtacgagtatcttctaatgcccacggagctcacaacatggccactgggtatggataccgtgggtgacttgctcatcgcgcaggagaatgctgcactgataggattaatgcagctagggccctcatctgatttcacgagcaggcatgtggtgaaagacatacctgtgaacttgctgctcgatggcgaggattgggagtttgagattcctgtgcaagctggcatgtccagcttcccttccagctggtctcgcgtccgtattcggcacctggagatgcactttgtgaaggaggccagcggtattggtggtgagattatccaccagcctaccacccagactgggaccgtttacatccttctgcagggttccactatcttccatgaccgcagaagagaccaggtgttgccttttcaggccgctgctccgctcaactaccattacgcgtaccgcctcgacaccggcgactccactctcacaaacgaaccctctgaacagtttgccaacaagttcatgcagatgacacccttcacccgttggaggcttcgtctgtctgcgtccgcaaaagagaatgcaggattagcctttcccacggctacagcacttgactccactacccagattgtcatcactttccatgttacggccatcagacaaattgactggcggcacgacgaagag

SEQ ID NO: 181 - DNA, 2601 bp, Artificial Sequence
  Synthetic
atggctctcgtggattacggcaagcttttcgaggatctgaaccagataagcatgggtgtactggatcgggtagagttttcagaggtgatggtgatccacaggatgtatgtgaggctagctgatctgaatgtggggcagctcgagggagccgagaaagtgaagcagctcatcatcttttccgacatcatcgagctcccagtcgtggaatggcggtggccgccgcaaataccaggatcggtgacggtgatcatattgtgtcgtcttcttcaatggccaactgatgggaggcagtcggacaccgagctccacctgacattcatgaagttgcatgccatacaacgagaggaaaatcggtgggagataaccgcagcagatggcatgaactggggagtttacatacacgcagaggaagtacaggttggcgtgctgacaatgtcatggtcttcggtacttagagtttcggcacttcgctctgttataacctccggctttcgcgccgttagtgtgtttgaggtaccgggaagtgtaaggtccacccttggagctactttaaggcccgatcacgccttatatagtacaactatgcaagccacacccaacgcatcgcatattagtgcttttaaccttcgcatagtttccccgtcggcatatcgtgtttgtcctctccaaaatgacacagatacctacttaggtattccagcagacgtggcggcagttcttccagtagacgtggtgactgatcctaacatcttgctgggcatgcagacaacggtacacattgcggagctagtcaaggcatgtcatccgtcacccgatgttgtgagcgctgtaggggagcacctgaactggctcaacaaactcttactcccacttaaggaatcgactcagttgcaaggaagcgagtcgtacaaggagtgccttgcactcttgggtcgtgttcacgctgcgatgaagatggtgagaattggcttagtagtgccccagctgcaatacagaatgtacggtagcctcatcaaccaaatggcccaagtagcacaaaactacgaccgagaattcaagcaattcaaattattcatcatccaaaatcaaatccttggcagctatttgctgcagcagaacagggcatttgctgagagggagctgcagatggagagctttcatgctgctgtcatttctcaaagaagggaggagttggacaatacattcgcaaagatggaccgattgagcgggcaaatggaggcagagagtagtgcaatggagcaagccaaaaaggaaatggacgaaggattgaggcagttccagaataggcaagttgcgaacgccctctttgccgttcttagcgctgtagctcagattgggcttgcattccttacggctggtgcaacggctcctggagctgtggcgtcggcggggcaagctgtgagcatagcaggtcaggcggcgcaaggtctgcgaagggtggtggaaattctagagcagctggaggctgtgatggaggttgtggctgctgtgaaggacctcgtggattcattggaacaggtaggtcagattgtggacgcaccggtgatgccggaattgccctcagaggcggactggtccatttttgtgaacgaggtggaggccgtggcagagggcatgccaacggaagtctcggaggttccggtgtggagggccaagtgcaagaatgtggctgcactgggtcgggagatgagcatcacggcagtacagatgtcggagctgcagtatgacatctgggtgcaaggcatgatgcgggatatggctcgaagccaggcagacaggctggccgcaattcaacccgcggaccttaccaactatttggagatggctacccagatggatatgcggactacgaggatgctgctggggctcctcaacatattgcgcatccagaatgcggcgctcaggtacgagtatcttctaatgcccacggagctcacaacatggccactgggtatggataccgtgggtgacttgctcatcgcgcaggagaatgctgcactgataggattaatgcagctagggccctcatctgatttcacgagcaggcatgtggtgaaagacatacctgtgaacttgctgctcgatggcgaggattgggagtttgagattcctgtgcaagctggcatgtccagcttcccttccagctggtctcgcgtccgtattcggcacctggagatgcactttgtgaaggaggccagcggtattggtggtgagattatccaccagcctaccacccagactgggaccgtttacatccttctgcagggttccactatcttccatgaccgcagaagagaccaggtgttgccttttcaggccgctgctccgctcaactaccattacgcgtaccgcctcgacaccggcgactccactctcacaaacgaaccctctgaacagtttgccaacaagttcatgcagatgacacccttcacccgttggaggcttcgtctgtctgcgtccgcaaaagagaatgcaggattagcctttcccacggctacagcacttgactccactacccagattgtcatcactttccatgttacggccatcagacaaattgactggcggcacgacgaagag

SEQ ID NO: 182 - DNA, 2601 bp, Artificial Sequence
  Synthetic
atggctctcgtggattacggcaagcttttcgaggatctgaaccagataagcatgggtgtactggatcgggtagagttttcagaggtgatggtgatccacaggatgtatgtgaggctagctgatctgaatgtggggcagctcgagggagccgagaaagtgaagcagttgtatattttttgcgacattatcgagctaccagtcgtggaatggcggtggccgccgcaaataccaggatcggtgacggtgatcatattgtgtcgtcttcttcaatggccaactgatgggaggcagtcggacaccgagctccacctgacattcatgaagttgcatgccatacaacgagaggaaaatcggtgggagataaccgcagcagatggcatgaactggggagtttacatacacgcagaggaagtacaggttggcgtgctgacaatgtcatggtcttcggtacttagagtttcggcacttcgctctgttataacctccggctttcgcgccgttagtgtgtttgaggtaccgggaagtgtaaggtccacccttggagctactttaaggcccgatcacgccttatatagtacaactatgcaagccacacccaacgcatcgcatattagtgcttttaaccttcgcatagtttccccgtcggcatatcgtgtttgtcctctccaaaatgacacagatacctacttaggtattccagcagacgtggcggcagttcttccagtagacgtggtgactgatcctaacatcttgctgggcatgcagacaacggtacacattgcggagctagtcaaggcatgtcatccgtcacccgatgttgtgagcgctgtaggggagcacctgaactggctcaacaaactcttactcccacttaaggaatcgactcagttgcaaggaagcgagtcgtacaaggagtgccttgcactcttgggtcgtgttcacgctgcgatgaagatggtgagaattggcttagtagtgccccagctgcaatacagaatgtacggtagcctcatcaaccaaatggcccaagtagcacaaaactacgaccgagaattcaagcaattcaaattattcatcatccaaaatcaaatccttggcagctatttgctgcagcagaacagggcatttgctgagagggagctgcagatggagagctttcatgctgctgtcatttctcaaagaagggaggagttggacaatacattcgcaaagatggaccgattgagcgggcaaatggaggcagagagtagtgcaatggagcaagccaaaaaggaaatggacgaaggattgaggcagttccagaataggcaagttgcgaacgccctctttgccgttcttagcgctgtagctcagattgggcttgcattccttacggctggtgcaacggctcctggagctgtggcgtcggcggggcaagctgtgagcatagcaggtcaggcggcgcaaggtctgcgaagggtggtggaaattctagagcagctggaggctgtgatggaggttgtggctgctgtgaaggacctcgtggattcattggaacaggtaggtcagattgtggacgcaccggtgatgccggaattgccctcagaggcggactggtccatttttgtgaacgaggtggaggccgtggcagagggcatgccaacggaagtctcggaggttccggtgtggagggccaagtgcaagaatgtggctgcactgggtcgggagatgagcatcacggcagtacagatgtcggagctgcagtatgacatctgggtgcaaggcatgatgcgggatatggctcgaagccaggcagacaggctggccgcaattcaacccgcggaccttaccaactatttggagatggctacccagatggatatgcggactacgaggatgctgctggggctcctcaacatattgcgcatccagaatgcggcgctcaggtacgagtatcttctaatgcccacggagctcacaacatggccactgggtatggataccgtgggtgacttgctcatcgcgcaggagaatgctgcactgataggattaatgcagctagggccctcatctgatttcacgagcaggcatgtggtgaaagacatacctgtgaacttgctgctcgatggcgaggattgggagtttgagattcctgtgcaagctggcatgtccagcttcccttccagctggtctcgcgtccgtattcggcacctggagatgcactttgtgaaggaggccagcggtattggtggtgagattatccaccagcctaccacccagactgggaccgtttacatccttctgcagggttccactatcttccatgaccgcagaagagaccaggtgttgccttttcaggccgctgctccgctcaactaccattacgcgtaccgcctcgacaccggcgactccactctcacaaacgaaccctctgaacagtttgccaacaagttcatgcagatgacacccttcacccgttggaggcttcgtctgtctgcgtccgcaaaagagaatgcaggattagcctttcccacggctacagcacttgactccactacccagattgtcatcactttccatgttacggccatcagacaaattgactggcggcacgacgaagag

SEQ ID NO: 183 - DNA, 2601 bp, Artificial Sequence
  Synthetic
atggctctcgtggattacggcaagcttttcgaggatctgaaccagataagcatgggtgtactggatcgggtagagttttcagaggtgatggtgatccacaggatgtatgtgaggctagctgatctgaatgtggggcagctcgagggagccgagaaagtgaagcagttgtatattttttgcgacgttctcgagctaccagtcgtggaatggcggtggccgccgcaaataccaggatcggtgacggtgatcatattgtgtcgtcttcttcaatggccaactgatgggaggcagtcggacaccgagctccacctgacattcatgaagttgcatgccatacaacgagaggaaaatcggtgggagataaccgcagcagatggcatgaactggggagtttacatacacgcagaggaagtacaggttggcgtgctgacaatgtcatggtcttcggtacttagagtttcggcacttcgctctgttataacctccggctttcgcgccgttagtgtgtttgaggtaccgggaagtgtaaggtccacccttggagctactttaaggcccgatcacgccttatatagtacaactatgcaagccacacccaacgcatcgcatattagtgcttttaaccttcgcatagtttccccgtcggcatatcgtgtttgtcctctccaaaatgacacagatacctacttaggtattccagcagacgtggcggcagttcttccagtagacgtggtgactgatcctaacatcttgctgggcatgcagacaacggtacacattgcggagctagtcaaggcatgtcatccgtcacccgatgttgtgagcgctgtaggggagcacctgaactggctcaacaaactcttactcccacttaaggaatcgactcagttgcaaggaagcgagtcgtacaaggagtgccttgcactcttgggtcgtgttcacgctgcgatgaagatggtgagaattggcttagtagtgccccagctgcaatacagaatgtacggtagcctcatcaaccaaatggcccaagtagcacaaaactacgaccgagaattcaagcaattcaaattattcatcatccaaaatcaaatccttggcagctatttgctgcagcagaacagggcatttgctgagagggagctgcagatggagagctttcatgctgctgtcatttctcaaagaagggaggagttggacaatacattcgcaaagatggaccgattgagcgggcaaatggaggcagagagtagtgcaatggagcaagccaaaaaggaaatggacgaaggattgaggcagttccagaataggcaagttgcgaacgccctctttgccgttcttagcgctgtagctcagattgggcttgcattccttacggctggtgcaacggctcctggagctgtggcgtcggcggggcaagctgtgagcatagcaggtcaggcggcgcaaggtctgcgaagggtggtggaaattctagagcagctggaggctgtgatggaggttgtggctgctgtgaaggacctcgtggattcattggaacaggtaggtcagattgtggacgcaccggtgatgccggaattgccctcagaggcggactggtccatttttgtgaacgaggtggaggccgtggcagagggcatgccaacggaagtctcggaggttccggtgtggagggccaagtgcaagaatgtggctgcactgggtcgggagatgagcatcacggcagtacagatgtcggagctgcagtatgacatctgggtgcaaggcatgatgcgggatatggctcgaagccaggcagacaggctggccgcaattcaacccgcggaccttaccaactatttggagatggctacccagatggatatgcggactacgaggatgctgctggggctcctcaacatattgcgcatccagaatgcggcgctcaggtacgagtatcttctaatgcccacggagctcacaacatggccactgggtatggataccgtgggtgacttgctcatcgcgcaggagaatgctgcactgataggattaatgcagctagggccctcatctgatttcacgagcaggcatgtggtgaaagacatacctgtgaacttgctgctcgatggcgaggattgggagtttgagattcctgtgcaagctggcatgtccagcttcccttccagctggtctcgcgtccgtattcggcacctggagatgcactttgtgaaggaggccagcggtattggtggtgagattatccaccagcctaccacccagactgggaccgtttacatccttctgcagggttccactatcttccatgaccgcagaagagaccaggtgttgccttttcaggccgctgctccgctcaactaccattacgcgtaccgcctcgacaccggcgactccactctcacaaacgaaccctctgaacagtttgccaacaagttcatgcagatgacacccttcacccgttggaggcttcgtctgtctgcgtccgcaaaagagaatgcaggattagcctttcccacggctacagcacttgactccactacccagattgtcatcactttccatgttacggccatcagacaaattgactggcggcacgacgaagag

SEQ ID NO: 184 - DNA, 2601 bp, Artificial Sequence
  Synthetic
atggctctcgtggattacggcaagcttttcgaggatctgaaccagataagcatgggtgtactggatcgggtagagttttcagaggtgatggtgatccacaggatgtatgtgaggctagctgatctgaatgtggggcagctcgagggagccgagaaagtgaagcagttgtatatttttggcgacgttatcgagctaccagtcgtggaatggcggtggccgccgcaaataccaggatcggtgacggtgatcatattgtgtcgtcttcttcaatggccaactgatgggaggcagtcggacaccgagctccacctgacattcatgaagttgcatgccatacaacgagaggaaaatcggtgggagataaccgcagcagatggcatgaactggggagtttacatacacgcagaggaagtacaggttggcgtgctgacaatgtcatggtcttcggtacttagagtttcggcacttcgctctgttataacctccggctttcgcgccgttagtgtgtttgaggtaccgggaagtgtaaggtccacccttggagctactttaaggcccgatcacgccttatatagtacaactatgcaagccacacccaacgcatcgcatattagtgcttttaaccttcgcatagtttccccgtcggcatatcgtgtttgtcctctccaaaatgacacagatacctacttaggtattccagcagacgtggcggcagttcttccagtagacgtggtgactgatcctaacatcttgctgggcatgcagacaacggtacacattgcggagctagtcaaggcatgtcatccgtcacccgatgttgtgagcgctgtaggggagcacctgaactggctcaacaaactcttactcccacttaaggaatcgactcagttgcaaggaagcgagtcgtacaaggagtgccttgcactcttgggtcgtgttcacgctgcgatgaagatggtgagaattggcttagtagtgccccagctgcaatacagaatgtacggtagcctcatcaaccaaatggcccaagtagcacaaaactacgaccgagaattcaagcaattcaaattattcatcatccaaaatcaaatccttggcagctatttgctgcagcagaacagggcatttgctgagagggagctgcagatggagagctttcatgctgctgtcatttctcaaagaagggaggagttggacaatacattcgcaaagatggaccgattgagcgggcaaatggaggcagagagtagtgcaatggagcaagccaaaaaggaaatggacgaaggattgaggcagttccagaataggcaagttgcgaacgccctctttgccgttcttagcgctgtagctcagattgggcttgcattccttacggctggtgcaacggctcctggagctgtggcgtcggcggggcaagctgtgagcatagcaggtcaggcggcgcaaggtctgcgaagggtggtggaaattctagagcagctggaggctgtgatggaggttgtggctgctgtgaaggacctcgtggattcattggaacaggtaggtcagattgtggacgcaccggtgatgccggaattgccctcagaggcggactggtccatttttgtgaacgaggtggaggccgtggcagagggcatgccaacggaagtctcggaggttccggtgtggagggccaagtgcaagaatgtggctgcactgggtcgggagatgagcatcacggcagtacagatgtcggagctgcagtatgacatctgggtgcaaggcatgatgcgggatatggctcgaagccaggcagacaggctggccgcaattcaacccgcggaccttaccaactatttggagatggctacccagatggatatgcggactacgaggatgctgctggggctcctcaacatattgcgcatccagaatgcggcgctcaggtacgagtatcttctaatgcccacggagctcacaacatggccactgggtatggataccgtgggtgacttgctcatcgcgcaggagaatgctgcactgataggattaatgcagctagggccctcatctgatttcacgagcaggcatgtggtgaaagacatacctgtgaacttgctgctcgatggcgaggattgggagtttgagattcctgtgcaagctggcatgtccagcttcccttccagctggtctcgcgtccgtattcggcacctggagatgcactttgtgaaggaggccagcggtattggtggtgagattatccaccagcctaccacccagactgggaccgtttacatccttctgcagggttccactatcttccatgaccgcagaagagaccaggtgttgccttttcaggccgctgctccgctcaactaccattacgcgtaccgcctcgacaccggcgactccactctcacaaacgaaccctctgaacagtttgccaacaagttcatgcagatgacacccttcacccgttggaggcttcgtctgtctgcgtccgcaaaagagaatgcaggattagcctttcccacggctacagcacttgactccactacccagattgtcatcactttccatgttacggccatcagacaaattgactggcggcacgacgaagag

SEQ ID NO: 185 - DNA, 2601 bp, Artificial Sequence
  Synthetic
atggctctcgtggattacggcaagcttttcgaggatctgaaccagataagcatgggtgtactggatcggatagagttttcagaggtgatggtgatccacaggatgtatgtgaggctagctgatctgaatgtggggcagctcgagggagccgagaaagtgaagcagttgtatatttttagcgacattatcgagctaccagtcgtggaatggcggtggccgccgcaaataccaggatcggtgacggtgatcatattgtgtcgtcttcttcaatggccaactgatgggaggcagtcggacaccgagctccacctgacattcatgaagttgcatgccatacaacgagaggaaaatcggtgggagataaccgcagcagatggcatgaactggggagtttacatacacgcagaggaagtacaggttggcgtgctgacaatgtcatggtcttcggtacttagagtttcggcacttcgctctgttataacctccggctttcgcgccgttagtgtgtttgaggtaccgggaagtgtaaggtccacccttggagctactttaaggcccgatcacgccttatatagtacaactatgcaagccacacccaacgcatcgcatattagtgcttttaaccttcgcatagtttccccgtcggcatatcgtgtttgtcctctccaaaatgacacagatacctacttaggtattccagcagacgtggcggcagttcttccagtagacgtggtgactgatcctaacatcttgctgggcatgcagacaacggtacacattgcggagctagtcaaggcatgtcatccgtcacccgatgttgtgagcgctgtaggggagcacctgaactggctcaacaaactcttactcccacttaaggaatcgactcagttgcaaggaagcgagtcgtacaaggagtgccttgcactcttgggtcgtgttcacgctgcgatgaagatggtgagaattggcttagtagtgccccagctgcaatacagaatgtacggtagcctcatcaaccaaatggcccaagtagcacaaaactacgaccgagaattcaagcaattcaaattattcatcatccaaaatcaaatccttggcagctatttgctgcagcagaacagggcatttgctgagagggagctgcagatggagagctttcatgctgctgtcatttctcaaagaagggaggagttggacaatacattcgcaaagatggaccgattgagcgggcaaatggaggcagagagtagtgcaatggagcaagccaaaaaggaaatggacgaaggattgaggcagttccagaataggcaagttgcgaacgccctctttgccgttcttagcgctgtagctcagattgggcttgcattccttacggctggtgcaacggctcctggagctgtggcgtcggcggggcaagctgtgagcatagcaggtcaggcggcgcaaggtctgcgaagggtggtggaaattctagagcagctggaggctgtgatggaggttgtggctgctgtgaaggacctcgtggattcattggaacaggtaggtcagattgtggacgcaccggtgatgccggaattgccctcagaggcggactggtccatttttgtgaacgaggtggaggccgtggcagagggcatgccaacggaagtctcggaggttccggtgtggagggccaagtgcaagaatgtggctgcactgggtcgggagatgagcatcacggcagtacagatgtcggagctgcagtatgacatctgggtgcaaggcatgatgcgggatatggctcgaagccaggcagacaggctggccgcaattcaacccgcggaccttaccaactatttggagatggctacccagatggatatgcggactacgaggatgctgctggggctcctcaacatattgcgcatccagaatgcggcgctcaggtacgagtatcttctaatgcccacggagctcacaacatggccactgggtatggataccgtgggtgacttgctcatcgcgcaggagaatgctgcactgataggattaatgcagctagggccctcatctgatttcacgagcaggcatgtggtgaaagacatacctgtgaacttgctgctcgatggcgaggattgggagtttgagattcctgtgcaagctggcatgtccagcttcccttccagctggtctcgcgtccgtattcggcacctggagatgcactttgtgaaggaggccagcggtattggtggtgagattatccaccagcctaccacccagactgggaccgtttacatccttctgcagggttccactatcttccatgaccgcagaagagaccaggtgttgccttttcaggccgctgctccgctcaactaccattacgcgtaccgcctcgacaccggcgactccactctcacaaacgaaccctctgaacagtttgccaacaagttcatgcagatgacacccttcacccgttggaggcttcgtctgtctgcgtccgcaaaagagaatgcaggattagcctttcccacggctacagcacttgactccactacccagattgtcatcactttccatgttacggccatcagacaaattgactggcggcacgacgaagag

SEQ ID NO: 186 - DNA, 2601 bp, Artificial Sequence
  Synthetic
atggctctcgtggattacggcaagcttttcgaggatctgaaccagataagcatgggtgtactggatcgggtagagttttcagaggtgatggtgatccacaggatgtatgtgaggctagctgatctgaatgtggggcagctcgagggagccgagaaagtgaagcagttgtatgttttttgcgacattctcgagctaccagtcgtggaatggcggtggccgccgcaaataccaggatcggtgacggtgatcatattgtgtcgtcttcttcaatggccaactgatgggaggcagtcggacaccgagctccacctgacattcatgaagttgcatgccatacaacgagaggaaaatcggtgggagataaccgcagcagatggcatgaactggggagtttacatacacgcagaggaagtacaggttggcgtgctgacaatgtcatggtcttcggtacttagagtttcggcacttcgctctgttataacctccggctttcgcgccgttagtgtgtttgaggtaccgggaagtgtaaggtccacccttggagctactttaaggcccgatcacgccttatatagtacaactatgcaagccacacccaacgcatcgcatattagtgcttttaaccttcgcatagtttccccgtcggcatatcgtgtttgtcctctccaaaatgacacagatacctacttaggtattccagcagacgtggcggcagttcttccagtagacgtggtgactgatcctaacatcttgctgggcatgcagacaacggtacacattgcggagctagtcaaggcatgtcatccgtcacccgatgttgtgagcgctgtaggggagcacctgaactggctcaacaaactcttactcccacttaaggaatcgactcagttgcaaggaagcgagtcgtacaaggagtgccttgcactcttgggtcgtgttcacgctgcgatgaagatggtgagaattggcttagtagtgccccagctgcaatacagaatgtacggtagcctcatcaaccaaatggcccaagtagcacaaaactacgaccgagaattcaagcaattcaaattattcatcatccaaaatcaaatccttggcagctatttgctgcagcagaacagggcatttgctgagagggagctgcagatggagagctttcatgctgctgtcatttctcaaagaagggaggagttggacaatacattcgcaaagatggaccgattgagcgggcaaatggaggcagagagtagtgcaatggagcaagccaaaaaggaaatggacgaaggattgaggcagttccagaataggcaagttgcgaacgccctctttgccgttcttagcgctgtagctcagattgggcttgcattccttacggctggtgcaacggctcctggagctgtggcgtcggcggggcaagctgtgagcatagcaggtcaggcggcgcaaggtctgcgaagggtggtggaaattctagagcagctggaggctgtgatggaggttgtggctgctgtgaaggacctcgtggattcattggaacaggtaggtcagattgtggacgcaccggtgatgccggaattgccctcagaggcggactggtccatttttgtgaacgaggtggaggccgtggcagagggcatgccaacggaagtctcggaggttccggtgtggagggccaagtgcaagaatgtggctgcactgggtcgggagatgagcatcacggcagtacagatgtcggagctgcagtatgacatctgggtgcaaggcatgatgcgggatatggctcgaagccaggcagacaggctggccgcaattcaacccgcggaccttaccaactatttggagatggctacccagatggatatgcggactacgaggatgctgctggggctcctcaacatattgcgcatccagaatgcggcgctcaggtacgagtatcttctaatgcccacggagctcacaacatggccactgggtatggataccgtgggtgacttgctcatcgcgcaggagaatgctgcactgataggattaatgcagctagggccctcatctgatttcacgagcaggcatgtggtgaaagacatacctgtgaacttgctgctcgatggcgaggattgggagtttgagattcctgtgcaagctggcatgtccagcttcccttccagctggtctcgcgtccgtattcggcacctggagatgcactttgtgaaggaggccagcggtattggtggtgagattatccaccagcctaccacccagactgggaccgtttacatccttctgcagggttccactatcttccatgaccgcagaagagaccaggtgttgccttttcaggccgctgctccgctcaactaccattacgcgtaccgcctcgacaccggcgactccactctcacaaacgaaccctctgaacagtttgccaacaagttcatgcagatgacacccttcacccgttggaggcttcgtctgtctgcgtccgcaaaagagaatgcaggattagcctttcccacggctacagcacttgactccactacccagattgtcatcactttccatgttacggccatcagacaaattgactggcggcacgacgaagag

SEQ ID NO: 187 - DNA, 2601 bp, Artificial Sequence
  Synthetic
atggctctcgtggattacggcaagcttttcgaggatctgaaccagataagcatgggtgtactggatcgggtagagttttcagaggtgatggtgatccacaggatgtatgtgaggctagctgatctgaatgtggggcagctcgagggagccgagaaagtgaagcagttgtatgtttttagcgacattctcgagctaccagtcgtggaatggcggtggccgccgcaaataccaggatcggtgacggtgatcatattgtgtcgtcttcttcaatggccaactgatgggaggcagtcggacaccgagctccacctgacattcatgaagttgcatgccatacaacgagaggaaaatcggtgggagataaccgcagcagatggcatgaactggggagtttacatacacgcagaggaagtacaggttggcgtgctgacaatgtcatggtcttcggtacttagagtttcggcacttcgctctgttataacctccggctttcgcgccgttagtgtgtttgaggtaccgggaagtgtaaggtccacccttggagctactttaaggcccgatcacgccttatatagtacaactatgcaagccacacccaacgcatcgcatattagtgcttttaaccttcgcatagtttccccgtcggcatatcgtgtttgtcctctccaaaatgacacagatacctacttaggtattccagcagacgtggcggcagttcttccagtagacgtggtgactgatcctaacatcttgctgggcatgcagacaacggtacacattgcggagctagtcaaggcatgtcatccgtcacccgatgttgtgagcgctgtaggggagcacctgaactggctcaacaaactcttactcccacttaaggaatcgactcagttgcaaggaagcgagtcgtacaaggagtgccttgcactcttgggtcgtgttcacgctgcgatgaagatggtgagaattggcttagtagtgccccagctgcaatacagaatgtacggtagcctcatcaaccaaatggcccaagtagcacaaaactacgaccgagaattcaagcaattcaaattattcatcatccaaaatcaaatccttggcagctatttgctgcagcagaacagggcatttgctgagagggagctgcagatggagagctttcatgctgctgtcatttctcaaagaagggaggagttggacaatacattcgcaaagatggaccgattgagcgggcaaatggaggcagagagtagtgcaatggagcaagccaaaaaggaaatggacgaaggattgaggcagttccagaataggcaagttgcgaacgccctctttgccgttcttagcgctgtagctcagattgggcttgcattccttacggctggtgcaacggctcctggagctgtggcgtcggcggggcaagctgtgagcatagcaggtcaggcggcgcaaggtctgcgaagggtggtggaaattctagagcagctggaggctgtgatggaggttgtggctgctgtgaaggacctcgtggattcattggaacaggtaggtcagattgtggacgcaccggtgatgccggaattgccctcagaggcggactggtccatttttgtgaacgaggtggaggccgtggcagagggcatgccaacggaagtctcggaggttccggtgtggagggccaagtgcaagaatgtggctgcactgggtcgggagatgagcatcacggcagtacagatgtcggagctgcagtatgacatctgggtgcaaggcatgatgcgggatatggctcgaagccaggcagacaggctggccgcaattcaacccgcggaccttaccaactatttggagatggctacccagatggatatgcggactacgaggatgctgctggggctcctcaacatattgcgcatccagaatgcggcgctcaggtacgagtatcttctaatgcccacggagctcacaacatggccactgggtatggataccgtgggtgacttgctcatcgcgcaggagaatgctgcactgataggattaatgcagctagggccctcatctgatttcacgagcaggcatgtggtgaaagacatacctgtgaacttgctgctcgatggcgaggattgggagtttgagattcctgtgcaagctggcatgtccagcttcccttccagctggtctcgcgtccgtattcggcacctggagatgcactttgtgaaggaggccagcggtattggtggtgagattatccaccagcctaccacccagactgggaccgtttacatccttctgcagggttccactatcttccatgaccgcagaagagaccaggtgttgccttttcaggccgctgctccgctcaactaccattacgcgtaccgcctcgacaccggcgactccactctcacaaacgaaccctctgaacagtttgccaacaagttcatgcagatgacacccttcacccgttggaggcttcgtctgtctgcgtccgcaaaagagaatgcaggattagcctttcccacggctacagcacttgactccactacccagattgtcatcactttccatgttacggccatcagacaaattgactggcggcacgacgaagag

SEQ ID NO: 188 - DNA, 2601 bp, Artificial Sequence
  Synthetic
atggctctcgtggattacggcaagcttttcgaggatctgaaccagataagcatgggtgtactggatcgggtagagttttcagaggtgatggtgatccacaggatgtatgtgaggctagctgatctgaatgtggggcagctcgagggagccgagaaagtgaagcagttgtatgtttttagcgacgttctcgtgctaccagtcgtggaatggcggtggccgccgcaaataccaggatcggtgacggtgatcatattgtgtcgtcttcttcaatggccaactgatgggaggcagtcggacaccgagctccacctgacattcatgaagttgcatgccatacaacgagaggaaaatcggtgggagataaccgcagcagatggcatgaactggggagtttacatacacgcagaggaagtacaggttggcgtgctgacaatgtcatggtcttcggtacttagagtttcggcacttcgctctgttataacctccggctttcgcgccgttagtgtgtttgaggtaccgggaagtgtaaggtccacccttggagctactttaaggcccgatcacgccttatatagtacaactatgcaagccacacccaacgcatcgcatattagtgcttttaaccttcgcatagtttccccgtcggcatatcgtgtttgtcctctccaaaatgacacagatacctacttaggtattccagcagacgtggcggcagttcttccagtagacgtggtgactgatcctaacatcttgctgggcatgcagacaacggtacacattgcggagctagtcaaggcatgtcatccgtcacccgatgttgtgagcgctgtaggggagcacctgaactggctcaacaaactcttactcccacttaaggaatcgactcagttgcaaggaagcgagtcgtacaaggagtgccttgcactcttgggtcgtgttcacgctgcgatgaagatggtgagaattggcttagtagtgccccagctgcaatacagaatgtacggtagcctcatcaaccaaatggcccaagtagcacaaaactacgaccgagaattcaagcaattcaaattattcatcatccaaaatcaaatccttggcagctatttgctgcagcagaacagggcatttgctgagagggagctgcagatggagagctttcatgctgctgtcatttctcaaagaagggaggagttggacaatacattcgcaaagatggaccgattgagcgggcaaatggaggcagagagtagtgcaatggagcaagccaaaaaggaaatggacgaaggattgaggcagttccagaataggcaagttgcgaacgccctctttgccgttcttagcgctgtagctcagattgggcttgcattccttacggctggtgcaacggctcctggagctgtggcgtcggcggggcaagctgtgagcatagcaggtcaggcggcgcaaggtctgcgaagggtggtggaaattctagagcagctggaggctgtgatggaggttgtggctgctgtgaaggacctcgtggattcattggaacaggtaggtcagattgtggacgcaccggtgatgccggaattgccctcagaggcggactggtccatttttgtgaacgaggtggaggccgtggcagagggcatgccaacggaagtctcggaggttccggtgtggagggccaagtgcaagaatgtggctgcactgggtcgggagatgagcatcacggcagtacagatgtcggagctgcagtatgacatctgggtgcaaggcatgatgcgggatatggctcgaagccaggcagacaggctggccgcaattcaacccgcggaccttaccaactatttggagatggctacccagatggatatgcggactacgaggatgctgctggggctcctcaacatattgcgcatccagaatgcggcgctcaggtacgagtatcttctaatgcccacggagctcacaacatggccactgggtatggataccgtgggtgacttgctcatcgcgcaggagaatgctgcactgataggattaatgcagctagggccctcatctgatttcacgagcaggcatgtggtgaaagacatacctgtgaacttgctgctcgatggcgaggattgggagtttgagattcctgtgcaagctggcatgtccagcttcccttccagctggtctcgcgtccgtattcggcacctggagatgcactttgtgaaggaggccagcggtattggtggtgagattatccaccagcctaccacccagactgggaccgtttacatccttctgcagggttccactatcttccatgaccgcagaagagaccaggtgttgccttttcaggccgctgctccgctcaactaccattacgcgtaccgcctcgacaccggcgactccactctcacaaacgaaccctctgaacagtttgccaacaagttcatgcagatgacacccttcacccgttggaggcttcgtctgtctgcgtccgcaaaagagaatgcaggattagcctttcccacggctacagcacttgactccactacccagattgtcatcactttccatgttacggccatcagacaaattgactggcggcacgacgaagag

SEQ ID NO: 189 - DNA, 2601 bp, Artificial Sequence
  Synthetic
atggctctcgtggattacggcaagcttttcgaggatctgaaccagataagcatgggtgtactggatcgggtagagttttcagaggtgatggtgatccacaggatgtatgtgaggctagctgatctgaatgtggggcagctcgagggagccgagaaagtgaagcgcttctatatctttgccgacatcgtcgagctcccagtcgtggaatggcggtggccgccgcaaataccaggatcggtgacggtgatcatattgtgtcgtcttcttcaatggccaactgatgggaggcagtcggacaccgagctccacctgacattcatgaagttgcatgccatacaacgagaggaaaatcggtgggagataaccgcagcagatggcatgaactggggagtttacatacacgcagaggaagtacaggttggcgtgctgacaatgtcatggtcttcggtacttagagtttcggcacttcgctctgttataacctccggctttcgcgccgttagtgtgtttgaggtaccgggaagtgtaaggtccacccttggagctactttaaggcccgatcacgccttatatagtacaactatgcaagccacacccaacgcatcgcatattagtgcttttaaccttcgcatagtttccccgtcggcatatcgtgtttgtcctctccaaaatgacacagatacctacttaggtattccagcagacgtggcggcagttcttccagtagacgtggtgactgatcctaacatcttgctgggcatgcagacaacggtacacattgcggagctagtcaaggcatgtcatccgtcacccgatgttgtgagcgctgtaggggagcacctgaactggctcaacaaactcttactcccacttaaggaatcgactcagttgcaaggaagcgagtcgtacaaggagtgccttgcactcttgggtcgtgttcacgctgcgatgaagatggtgagaattggcttagtagtgccccagctgcaatacagaatgtacggtagcctcatcaaccaaatggcccaagtagcacaaaactacgaccgagaattcaagcaattcaaattattcatcatccaaaatcaaatccttggcagctatttgctgcagcagaacagggcatttgctgagagggagctgcagatggagagctttcatgctgctgtcatttctcaaagaagggaggagttggacaatacattcgcaaagatggaccgattgagcgggcaaatggaggcagagagtagtgcaatggagcaagccaaaaaggaaatggacgaaggattgaggcagttccagaataggcaagttgcgaacgccctctttgccgttcttagcgctgtagctcagattgggcttgcattccttacggctggtgcaacggctcctggagctgtggcgtcggcggggcaagctgtgagcatagcaggtcaggcggcgcaaggtctgcgaagggtggtggaaattctagagcagctggaggctgtgatggaggttgtggctgctgtgaaggacctcgtggattcattggaacaggtaggtcagattgtggacgcaccggtgatgccggaattgccctcagaggcggactggtccatttttgtgaacgaggtggaggccgtggcagagggcatgccaacggaagtctcggaggttccggtgtggagggccaagtgcaagaatgtggctgcactgggtcgggagatgagcatcacggcagtacagatgtcggagctgcagtatgacatctgggtgcaaggcatgatgcgggatatggctcgaagccaggcagacaggctggccgcaattcaacccgcggaccttaccaactatttggagatggctacccagatggatatgcggactacgaggatgctgctggggctcctcaacatattgcgcatccagaatgcggcgctcaggtacgagtatcttctaatgcccacggagctcacaacatggccactgggtatggataccgtgggtgacttgctcatcgcgcaggagaatgctgcactgataggattaatgcagctagggccctcatctgatttcacgagcaggcatgtggtgaaagacatacctgtgaacttgctgctcgatggcgaggattgggagtttgagattcctgtgcaagctggcatgtccagcttcccttccagctggtctcgcgtccgtattcggcacctggagatgcactttgtgaaggaggccagcggtattggtggtgagattatccaccagcctaccacccagactgggaccgtttacatccttctgcagggttccactatcttccatgaccgcagaagagaccaggtgttgccttttcaggccgctgctccgctcaactaccattacgcgtaccgcctcgacaccggcgactccactctcacaaacgaaccctctgaacagtttgccaacaagttcatgcagatgacacccttcacccgttggaggcttcgtctgtctgcgtccgcaaaagagaatgcaggattagcctttcccacggctacagcacttgactccactacccagattgtcatcactttccatgttacggccatcagacaaattgactggcggcacgacgaagag

SEQ ID NO: 190 - DNA, 2601 bp, Artificial Sequence
  Synthetic
atggctctcgtggattacggcaagcttttcgaggatctgaaccagataagcatgggtgtactggatcgggtagagttttcagaggtgatggtgatccacaggatgtatgtgaggctagctgatctgaatgtggggcagctcgagggagccgagaaagtgaagcgcttctatatcttttccgacatcatcgagctcccagtcgtggaatggcggtggccgccgcaaataccaggatcggtgacggtgatcatattgtgtcgtcttcttcaatggccaactgatgggaggcagtcggacaccgagctccacctgacattcatgaagttgcatgccatacaacgagaggaaaatcggtgggagataaccgcagcagatggcatgaactggggagtttacatacacgcagaggaagtacaggttggcgtgctgacaatgtcatggtcttcggtacttagagtttcggcacttcgctctgttataacctccggctttcgcgccgttagtgtgtttgaggtaccgggaagtgtaaggtccacccttggagctactttaaggcccgatcacgccttatatagtacaactatgcaagccacacccaacgcatcgcatattagtgcttttaaccttcgcatagtttccccgtcggcatatcgtgtttgtcctctccaaaatgacacagatacctacttaggtattccagcagacgtggcggcagttcttccagtagacgtggtgactgatcctaacatcttgctgggcatgcagacaacggtacacattgcggagctagtcaaggcatgtcatccgtcacccgatgttgtgagcgctgtaggggagcacctgaactggctcaacaaactcttactcccacttaaggaatcgactcagttgcaaggaagcgagtcgtacaaggagtgccttgcactcttgggtcgtgttcacgctgcgatgaagatggtgagaattggcttagtagtgccccagctgcaatacagaatgtacggtagcctcatcaaccaaatggcccaagtagcacaaaactacgaccgagaattcaagcaattcaaattattcatcatccaaaatcaaatccttggcagctatttgctgcagcagaacagggcatttgctgagagggagctgcagatggagagctttcatgctgctgtcatttctcaaagaagggaggagttggacaatacattcgcaaagatggaccgattgagcgggcaaatggaggcagagagtagtgcaatggagcaagccaaaaaggaaatggacgaaggattgaggcagttccagaataggcaagttgcgaacgccctctttgccgttcttagcgctgtagctcagattgggcttgcattccttacggctggtgcaacggctcctggagctgtggcgtcggcggggcaagctgtgagcatagcaggtcaggcggcgcaaggtctgcgaagggtggtggaaattctagagcagctggaggctgtgatggaggttgtggctgctgtgaaggacctcgtggattcattggaacaggtaggtcagattgtggacgcaccggtgatgccggaattgccctcagaggcggactggtccatttttgtgaacgaggtggaggccgtggcagagggcatgccaacggaagtctcggaggttccggtgtggagggccaagtgcaagaatgtggctgcactgggtcgggagatgagcatcacggcagtacagatgtcggagctgcagtatgacatctgggtgcaaggcatgatgcgggatatggctcgaagccaggcagacaggctggccgcaattcaacccgcggaccttaccaactatttggagatggctacccagatggatatgcggactacgaggatgctgctggggctcctcaacatattgcgcatccagaatgcggcgctcaggtacgagtatcttctaatgcccacggagctcacaacatggccactgggtatggataccgtgggtgacttgctcatcgcgcaggagaatgctgcactgataggattaatgcagctagggccctcatctgatttcacgagcaggcatgtggtgaaagacatacctgtgaacttgctgctcgatggcgaggattgggagtttgagattcctgtgcaagctggcatgtccagcttcccttccagctggtctcgcgtccgtattcggcacctggagatgcactttgtgaaggaggccagcggtattggtggtgagattatccaccagcctaccacccagactgggaccgtttacatccttctgcagggttccactatcttccatgaccgcagaagagaccaggtgttgccttttcaggccgctgctccgctcaactaccattacgcgtaccgcctcgacaccggcgactccactctcacaaacgaaccctctgaacagtttgccaacaagttcatgcagatgacacccttcacccgttggaggcttcgtctgtctgcgtccgcaaaagagaatgcaggattagcctttcccacggctacagcacttgactccactacccagattgtcatcactttccatgttacggccatcagacaaattgactggcggcacgacgaagag

SEQ ID NO: 191 - DNA, 2601 bp, Artificial Sequence
  Synthetic
atggctctcgtggattacggcaagcttttcgaggatctgaaccagataagcatgggtgtactggatcgggtagagttttcagaggtgatggtgatccacaggatgtatgtgaggctagctgatctgaatgtggggcagctcgagggagccgagaaagtgaagcgcttctatgtctttagcgacatcgtcgagctcccagtcgtggaatggcggtggccgccgcaaataccaggatcggtgacggtgatcatattgtgtcgtcttcttcaatggccaactgatgggaggcagtcggacaccgagctccacctgacattcatgaagttgcatgccatacaacgagaggaaaatcggtgggagataaccgcagcagatggcatgaactggggagtttacatacacgcagaggaagtacaggttggcgtgctgacaatgtcatggtcttcggtacttagagtttcggcacttcgctctgttataacctccggctttcgcgccgttagtgtgtttgaggtaccgggaagtgtaaggtccacccttggagctactttaaggcccgatcacgccttatatagtacaactatgcaagccacacccaacgcatcgcatattagtgcttttaaccttcgcatagtttccccgtcggcatatcgtgtttgtcctctccaaaatgacacagatacctacttaggtattccagcagacgtggcggcagttcttccagtagacgtggtgactgatcctaacatcttgctgggcatgcagacaacggtacacattgcggagctagtcaaggcatgtcatccgtcacccgatgttgtgagcgctgtaggggagcacctgaactggctcaacaaactcttactcccacttaaggaatcgactcagttgcaaggaagcgagtcgtacaaggagtgccttgcactcttgggtcgtgttcacgctgcgatgaagatggtgagaattggcttagtagtgccccagctgcaatacagaatgtacggtagcctcatcaaccaaatggcccaagtagcacaaaactacgaccgagaattcaagcaattcaaattattcatcatccaaaatcaaatccttggcagctatttgctgcagcagaacagggcatttgctgagagggagctgcagatggagagctttcatgctgctgtcatttctcaaagaagggaggagttggacaatacattcgcaaagatggaccgattgagcgggcaaatggaggcagagagtagtgcaatggagcaagccaaaaaggaaatggacgaaggattgaggcagttccagaataggcaagttgcgaacgccctctttgccgttcttagcgctgtagctcagattgggcttgcattccttacggctggtgcaacggctcctggagctgtggcgtcggcggggcaagctgtgagcatagcaggtcaggcggcgcaaggtctgcgaagggtggtggaaattctagagcagctggaggctgtgatggaggttgtggctgctgtgaaggacctcgtggattcattggaacaggtaggtcagattgtggacgcaccggtgatgccggaattgccctcagaggcggactggtccatttttgtgaacgaggtggaggccgtggcagagggcatgccaacggaagtctcggaggttccggtgtggagggccaagtgcaagaatgtggctgcactgggtcgggagatgagcatcacggcagtacagatgtcggagctgcagtatgacatctgggtgcaaggcatgatgcgggatatggctcgaagccaggcagacaggctggccgcaattcaacccgcggaccttaccaactatttggagatggctacccagatggatatgcggactacgaggatgctgctggggctcctcaacatattgcgcatccagaatgcggcgctcaggtacgagtatcttctaatgcccacggagctcacaacatggccactgggtatggataccgtgggtgacttgctcatcgcgcaggagaatgctgcactgataggattaatgcagctagggccctcatctgatttcacgagcaggcatgtggtgaaagacatacctgtgaacttgctgctcgatggcgaggattgggagtttgagattcctgtgcaagctggcatgtccagcttcccttccagctggtctcgcgtccgtattcggcacctggagatgcactttgtgaaggaggccagcggtattggtggtgagattatccaccagcctaccacccagactgggaccgtttacatccttctgcagggttccactatcttccatgaccgcagaagagaccaggtgttgccttttcaggccgctgctccgctcaactaccattacgcgtaccgcctcgacaccggcgactccactctcacaaacgaaccctctgaacagtttgccaacaagttcatgcagatgacacccttcacccgttggaggcttcgtctgtctgcgtccgcaaaagagaatgcaggattagcctttcccacggctacagcacttgactccactacccagattgtcatcactttccatgttacggccatcagacaaattgactggcggcacgacgaagag

SEQ ID NO: 192 - DNA, 2601 bp, Artificial Sequence
  Synthetic
atggctctcgtggattacggcaagcttttcgaggatctgaaccagataagcatgggtgtactggatcgggtagagttttcagaggtgatggtgatccacaggatgtatgtgaggctagctgatctgaatgtggggcagctcgagggagccgagaaagtgaagcgcctcgtcatcttgggcgacatcatcgtggtcccagtcgtggaatggcggtggccgccgcaaataccaggatcggtgacggtgatcatattgtgtcgtcttcttcaatggccaactgatgggaggcagtcggacaccgagctccacctgacattcatgaagttgcatgccatacaacgagaggaaaatcggtgggagataaccgcagcagatggcatgaactggggagtttacatacacgcagaggaagtacaggttggcgtgctgacaatgtcatggtcttcggtacttagagtttcggcacttcgctctgttataacctccggctttcgcgccgttagtgtgtttgaggtaccgggaagtgtaaggtccacccttggagctactttaaggcccgatcacgccttatatagtacaactatgcaagccacacccaacgcatcgcatattagtgcttttaaccttcgcatagtttccccgtcggcatatcgtgtttgtcctctccaaaatgacacagatacctacttaggtattccagcagacgtggcggcagttcttccagtagacgtggtgactgatcctaacatcttgctgggcatgcagacaacggtacacattgcggagctagtcaaggcatgtcatccgtcacccgatgttgtgagcgctgtaggggagcacctgaactggctcaacaaactcttactcccacttaaggaatcgactcagttgcaaggaagcgagtcgtacaaggagtgccttgcactcttgggtcgtgttcacgctgcgatgaagatggtgagaattggcttagtagtgccccagctgcaatacagaatgtacggtagcctcatcaaccaaatggcccaagtagcacaaaactacgaccgagaattcaagcaattcaaattattcatcatccaaaatcaaatccttggcagctatttgctgcagcagaacagggcatttgctgagagggagctgcagatggagagctttcatgctgctgtcatttctcaaagaagggaggagttggacaatacattcgcaaagatggaccgattgagcgggcaaatggaggcagagagtagtgcaatggagcaagccaaaaaggaaatggacgaaggattgaggcagttccagaataggcaagttgcgaacgccctctttgccgttcttagcgctgtagctcagattgggcttgcattccttacggctggtgcaacggctcctggagctgtggcgtcggcggggcaagctgtgagcatagcaggtcaggcggcgcaaggtctgcgaagggtggtggaaattctagagcagctggaggctgtgatggaggttgtggctgctgtgaaggacctcgtggattcattggaacaggtaggtcagattgtggacgcaccggtgatgccggaattgccctcagaggcggactggtccatttttgtgaacgaggtggaggccgtggcagagggcatgccaacggaagtctcggaggttccggtgtggagggccaagtgcaagaatgtggctgcactgggtcgggagatgagcatcacggcagtacagatgtcggagctgcagtatgacatctgggtgcaaggcatgatgcgggatatggctcgaagccaggcagacaggctggccgcaattcaacccgcggaccttaccaactatttggagatggctacccagatggatatgcggactacgaggatgctgctggggctcctcaacatattgcgcatccagaatgcggcgctcaggtacgagtatcttctaatgcccacggagctcacaacatggccactgggtatggataccgtgggtgacttgctcatcgcgcaggagaatgctgcactgataggattaatgcagctagggccctcatctgatttcacgagcaggcatgtggtgaaagacatacctgtgaacttgctgctcgatggcgaggattgggagtttgagattcctgtgcaagctggcatgtccagcttcccttccagctggtctcgcgtccgtattcggcacctggagatgcactttgtgaaggaggccagcggtattggtggtgagattatccaccagcctaccacccagactgggaccgtttacatccttctgcagggttccactatcttccatgaccgcagaagagaccaggtgttgccttttcaggccgctgctccgctcaactaccattacgcgtaccgcctcgacaccggcgactccactctcacaaacgaaccctctgaacagtttgccaacaagttcatgcagatgacacccttcacccgttggaggcttcgtctgtctgcgtccgcaaaagagaatgcaggattagcctttcccacggctacagcacttgactccactacccagattgtcatcactttccatgttacggccatcagacaaattgactggcggcacgacgaagag

SEQ ID NO: 193 - DNA, 2601 bp, Artificial Sequence
  Synthetic
atggctctcgtggattacggcaagcttttcgaggatctgaaccagataagcatgggtgtactggatcgggtagagttttcagaggtgatggtgatccacaggatgtatgtgaggctagctgatctgaatgtggggcagctcgagggagccgagaaagtgaagcgcttgtatatttttgccgacattatcgagctaccagtcgtggaatggcggtggccgccgcaaataccaggatcggtgacggtgatcatattgtgtcgtcttcttcaatggccaactgatgggaggcagtcggacaccgagctccacctgacattcatgaagttgcatgccatacaacgagaggaaaatcggtgggagataaccgcagcagatggcatgaactggggagtttacatacacgcagaggaagtacaggttggcgtgctgacaatgtcatggtcttcggtacttagagtttcggcacttcgctctgttataacctccggctttcgcgccgttagtgtgtttgaggtaccgggaagtgtaaggtccacccttggagctactttaaggcccgatcacgccttatatagtacaactatgcaagccacacccaacgcatcgcatattagtgcttttaaccttcgcatagtttccccgtcggcatatcgtgtttgtcctctccaaaatgacacagatacctacttaggtattccagcagacgtggcggcagttcttccagtagacgtggtgactgatcctaacatcttgctgggcatgcagacaacggtacacattgcggagctagtcaaggcatgtcatccgtcacccgatgttgtgagcgctgtaggggagcacctgaactggctcaacaaactcttactcccacttaaggaatcgactcagttgcaaggaagcgagtcgtacaaggagtgccttgcactcttgggtcgtgttcacgctgcgatgaagatggtgagaattggcttagtagtgccccagctgcaatacagaatgtacggtagcctcatcaaccaaatggcccaagtagcacaaaactacgaccgagaattcaagcaattcaaattattcatcatccaaaatcaaatccttggcagctatttgctgcagcagaacagggcatttgctgagagggagctgcagatggagagctttcatgctgctgtcatttctcaaagaagggaggagttggacaatacattcgcaaagatggaccgattgagcgggcaaatggaggcagagagtagtgcaatggagcaagccaaaaaggaaatggacgaaggattgaggcagttccagaataggcaagttgcgaacgccctctttgccgttcttagcgctgtagctcagattgggcttgcattccttacggctggtgcaacggctcctggagctgtggcgtcggcggggcaagctgtgagcatagcaggtcaggcggcgcaaggtctgcgaagggtggtggaaattctagagcagctggaggctgtgatggaggttgtggctgctgtgaaggacctcgtggattcattggaacaggtaggtcagattgtggacgcaccggtgatgccggaattgccctcagaggcggactggtccatttttgtgaacgaggtggaggccgtggcagagggcatgccaacggaagtctcggaggttccggtgtggagggccaagtgcaagaatgtggctgcactgggtcgggagatgagcatcacggcagtacagatgtcggagctgcagtatgacatctgggtgcaaggcatgatgcgggatatggctcgaagccaggcagacaggctggccgcaattcaacccgcggaccttaccaactatttggagatggctacccagatggatatgcggactacgaggatgctgctggggctcctcaacatattgcgcatccagaatgcggcgctcaggtacgagtatcttctaatgcccacggagctcacaacatggccactgggtatggataccgtgggtgacttgctcatcgcgcaggagaatgctgcactgataggattaatgcagctagggccctcatctgatttcacgagcaggcatgtggtgaaagacatacctgtgaacttgctgctcgatggcgaggattgggagtttgagattcctgtgcaagctggcatgtccagcttcccttccagctggtctcgcgtccgtattcggcacctggagatgcactttgtgaaggaggccagcggtattggtggtgagattatccaccagcctaccacccagactgggaccgtttacatccttctgcagggttccactatcttccatgaccgcagaagagaccaggtgttgccttttcaggccgctgctccgctcaactaccattacgcgtaccgcctcgacaccggcgactccactctcacaaacgaaccctctgaacagtttgccaacaagttcatgcagatgacacccttcacccgttggaggcttcgtctgtctgcgtccgcaaaagagaatgcaggattagcctttcccacggctacagcacttgactccactacccagattgtcatcactttccatgttacggccatcagacaaattgactggcggcacgacgaagag

SEQ ID NO: 194 - DNA, 2601 bp, Artificial Sequence
  Synthetic
atggctctcgtggattacggcaagcttttcgaggatctgaaccagataagcatgggtgtactggatcgggtagagttttcagaggtgatggtgatccacaggatgtatgtgaggctagctgatctgaatgtggggcagctcgagggagccgagaaagtgaagcgcttgtatattttttgcgacattatcgtgctaccagtcgtggaatggcggtggccgccgcaaataccaggatcggtgacggtgatcatattgtgtcgtcttcttcaatggccaactgatgggaggcagtcggacaccgagctccacctgacattcatgaagttgcatgccatacaacgagaggaaaatcggtgggagataaccgcagcagatggcatgaactggggagtttacatacacgcagaggaagtacaggttggcgtgctgacaatgtcatggtcttcggtacttagagtttcggcacttcgctctgttataacctccggctttcgcgccgttagtgtgtttgaggtaccgggaagtgtaaggtccacccttggagctactttaaggcccgatcacgccttatatagtacaactatgcaagccacacccaacgcatcgcatattagtgcttttaaccttcgcatagtttccccgtcggcatatcgtgtttgtcctctccaaaatgacacagatacctacttaggtattccagcagacgtggcggcagttcttccagtagacgtggtgactgatcctaacatcttgctgggcatgcagacaacggtacacattgcggagctagtcaaggcatgtcatccgtcacccgatgttgtgagcgctgtaggggagcacctgaactggctcaacaaactcttactcccacttaaggaatcgactcagttgcaaggaagcgagtcgtacaaggagtgccttgcactcttgggtcgtgttcacgctgcgatgaagatggtgagaattggcttagtagtgccccagctgcaatacagaatgtacggtagcctcatcaaccaaatggcccaagtagcacaaaactacgaccgagaattcaagcaattcaaattattcatcatccaaaatcaaatccttggcagctatttgctgcagcagaacagggcatttgctgagagggagctgcagatggagagctttcatgctgctgtcatttctcaaagaagggaggagttggacaatacattcgcaaagatggaccgattgagcgggcaaatggaggcagagagtagtgcaatggagcaagccaaaaaggaaatggacgaaggattgaggcagttccagaataggcaagttgcgaacgccctctttgccgttcttagcgctgtagctcagattgggcttgcattccttacggctggtgcaacggctcctggagctgtggcgtcggcggggcaagctgtgagcatagcaggtcaggcggcgcaaggtctgcgaagggtggtggaaattctagagcagctggaggctgtgatggaggttgtggctgctgtgaaggacctcgtggattcattggaacaggtaggtcagattgtggacgcaccggtgatgccggaattgccctcagaggcggactggtccatttttgtgaacgaggtggaggccgtggcagagggcatgccaacggaagtctcggaggttccggtgtggagggccaagtgcaagaatgtggctgcactgggtcgggagatgagcatcacggcagtacagatgtcggagctgcagtatgacatctgggtgcaaggcatgatgcgggatatggctcgaagccaggcagacaggctggccgcaattcaacccgcggaccttaccaactatttggagatggctacccagatggatatgcggactacgaggatgctgctggggctcctcaacatattgcgcatccagaatgcggcgctcaggtacgagtatcttctaatgcccacggagctcacaacatggccactgggtatggataccgtgggtgacttgctcatcgcgcaggagaatgctgcactgataggattaatgcagctagggccctcatctgatttcacgagcaggcatgtggtgaaagacatacctgtgaacttgctgctcgatggcgaggattgggagtttgagattcctgtgcaagctggcatgtccagcttcccttccagctggtctcgcgtccgtattcggcacctggagatgcactttgtgaaggaggccagcggtattggtggtgagattatccaccagcctaccacccagactgggaccgtttacatccttctgcagggttccactatcttccatgaccgcagaagagaccaggtgttgccttttcaggccgctgctccgctcaactaccattacgcgtaccgcctcgacaccggcgactccactctcacaaacgaaccctctgaacagtttgccaacaagttcatgcagatgacacccttcacccgttggaggcttcgtctgtctgcgtccgcaaaagagaatgcaggattagcctttcccacggctacagcacttgactccactacccagattgtcatcactttccatgttacggccatcagacaaattgactggcggcacgacgaagag

SEQ ID NO: 195 - DNA, 2601 bp, Artificial Sequence
  Synthetic
atggctctcgtggattacggcaagcttttcgaggatctgaaccagataagcatgggtgtactggatcgggtagagttttcagaggtgatggtgatccacaggatgtatgtgaggctagctgatctgaatgtggggcagctcgagggagccgagaaagtgaagcgcttgtatattttttgcgacattgtcgagctaccagtcgtggaatggcggtggccgccgcaaataccaggatcggtgacggtgatcatattgtgtcgtcttcttcaatggccaactgatgggaggcagtcggacaccgagctccacctgacattcatgaagttgcatgccatacaacgagaggaaaatcggtgggagataaccgcagcagatggcatgaactggggagtttacatacacgcagaggaagtacaggttggcgtgctgacaatgtcatggtcttcggtacttagagtttcggcacttcgctctgttataacctccggctttcgcgccgttagtgtgtttgaggtaccgggaagtgtaaggtccacccttggagctactttaaggcccgatcacgccttatatagtacaactatgcaagccacacccaacgcatcgcatattagtgcttttaaccttcgcatagtttccccgtcggcatatcgtgtttgtcctctccaaaatgacacagatacctacttaggtattccagcagacgtggcggcagttcttccagtagacgtggtgactgatcctaacatcttgctgggcatgcagacaacggtacacattgcggagctagtcaaggcatgtcatccgtcacccgatgttgtgagcgctgtaggggagcacctgaactggctcaacaaactcttactcccacttaaggaatcgactcagttgcaaggaagcgagtcgtacaaggagtgccttgcactcttgggtcgtgttcacgctgcgatgaagatggtgagaattggcttagtagtgccccagctgcaatacagaatgtacggtagcctcatcaaccaaatggcccaagtagcacaaaactacgaccgagaattcaagcaattcaaattattcatcatccaaaatcaaatccttggcagctatttgctgcagcagaacagggcatttgctgagagggagctgcagatggagagctttcatgctgctgtcatttctcaaagaagggaggagttggacaatacattcgcaaagatggaccgattgagcgggcaaatggaggcagagagtagtgcaatggagcaagccaaaaaggaaatggacgaaggattgaggcagttccagaataggcaagttgcgaacgccctctttgccgttcttagcgctgtagctcagattgggcttgcattccttacggctggtgcaacggctcctggagctgtggcgtcggcggggcaagctgtgagcatagcaggtcaggcggcgcaaggtctgcgaagggtggtggaaattctagagcagctggaggctgtgatggaggttgtggctgctgtgaaggacctcgtggattcattggaacaggtaggtcagattgtggacgcaccggtgatgccggaattgccctcagaggcggactggtccatttttgtgaacgaggtggaggccgtggcagagggcatgccaacggaagtctcggaggttccggtgtggagggccaagtgcaagaatgtggctgcactgggtcgggagatgagcatcacggcagtacagatgtcggagctgcagtatgacatctgggtgcaaggcatgatgcgggatatggctcgaagccaggcagacaggctggccgcaattcaacccgcggaccttaccaactatttggagatggctacccagatggatatgcggactacgaggatgctgctggggctcctcaacatattgcgcatccagaatgcggcgctcaggtacgagtatcttctaatgcccacggagctcacaacatggccactgggtatggataccgtgggtgacttgctcatcgcgcaggagaatgctgcactgataggattaatgcagctagggccctcatctgatttcacgagcaggcatgtggtgaaagacatacctgtgaacttgctgctcgatggcgaggattgggagtttgagattcctgtgcaagctggcatgtccagcttcccttccagctggtctcgcgtccgtattcggcacctggagatgcactttgtgaaggaggccagcggtattggtggtgagattatccaccagcctaccacccagactgggaccgtttacatccttctgcagggttccactatcttccatgaccgcagaagagaccaggtgttgccttttcaggccgctgctccgctcaactaccattacgcgtaccgcctcgacaccggcgactccactctcacaaacgaaccctctgaacagtttgccaacaagttcatgcagatgacacccttcacccgttggaggcttcgtctgtctgcgtccgcaaaagagaatgcaggattagcctttcccacggctacagcacttgactccactacccagattgtcatcactttccatgttacggccatcagacaaattgactggcggcacgacgaagag

SEQ ID NO: 196 - DNA, 2601 bp, Artificial Sequence
  Synthetic
atggctctcgtggattacggcaagcttttcgaggatctgaaccagataagcatgggtgtactggatcgggtagagttttcagaggtgatggtgatccacaggatgtatgtgaggctagctgatctgaatgtggggcagctcgagggagccgagaaagtgaagcgcttgtatatttttggcgacattatcgagctaccagtcgtggaatggcggtggccggcgcaaataccaggatcggtgacggtgatcatattgtgtcgtcttcttcaatggccaactgatgggaggcagtcggacaccgagctccacctgacattcatgaagttgcatgccatacaacgagaggaaaatcggtgggagataaccgcagcagatggcatgaactggggagtttacatacacgcagaggaagtacaggttggcgtgctgacaatgtcatggtcttcggtacttagagtttcggcacttcgctctgttataacctccggctttcgcgccgttagtgtgtttgaggtaccgggaagtgtaaggtccacccttggagctactttaaggcccgatcacgccttatatagtacaactatgcaagccacacccaacgcatcgcatattagtgcttttaaccttcgcatagtttccccgtcggcatatcgtgtttgtcctctccaaaatgacacagatacctacttaggtattccagcagacgtggcggcagttcttccagtagacgtggtgactgatcctaacatcttgctgggcatgcagacaacggtacacattgcggagctagtcaaggcatgtcatccgtcacccgatgttgtgagcgctgtaggggagcacctgaactggctcaacaaactcttactcccacttaaggaatcgactcagttgcaaggaagcgagtcgtacaaggagtgccttgcactcttgggtcgtgttcacgctgcgatgaagatggtgagaattggcttagtagtgccccagctgcaatacagaatgtacggtagcctcatcaaccaaatggcccaagtagcacaaaactacgaccgagaattcaagcaattcaaattattcatcatccaaaatcaaatccttggcagctatttgctgcagcagaacagggcatttgctgagagggagctgcagatggagagctttcatgctgctgtcatttctcaaagaagggaggagttggacaatacattcgcaaagatggaccgattgagcgggcaaatggaggcagagagtagtgcaatggagcaagccaaaaaggaaatggacgaaggattgaggcagttccagaataggcaagttgcgaacgccctctttgccgttcttagcgctgtagctcagattgggcttgcattccttacggctggtgcaacggctcctggagctgtggcgtcggcggggcaagctgtgagcatagcaggtcaggcggcgcaaggtctgcgaagggtggtggaaattctagagcagctggaggctgtgatggaggttgtggctgctgtgaaggacctcgtggattcattggaacaggtaggtcagattgtggacgcaccggtgatgccggaattgccctcagaggcggactggtccatttttgtgaacgaggtggaggccgtggcagagggcatgccaacggaagtctcggaggttccggtgtggagggccaagtgcaagaatgtggctgcactgggtcgggagatgagcatcacggcagtacagatgtcggagctgcagtatgacatctgggtgcaaggcatgatgcgggatatggctcgaagccaggcagacaggctggccgcaattcaacccgcggaccttaccaactatttggagatggctacccagatggatatgcggactacgaggatgctgctggggctcctcaacatattgcgcatccagaatgcggcgctcaggtacgagtatcttctaatgcccacggagctcacaacatggccactgggtatggataccgtgggtgacttgctcatcgcgcaggagaatgctgcactgataggattaatgcagctagggccctcatctgatttcacgagcaggcatgtggtgaaagacatacctgtgaacttgctgctcgatggcgaggattgggagtttgagattcctgtgcaagctggcatgtccagcttcccttccagctggtctcgcgtccgtattcggcacctggagatgcactttgtgaaggaggccagcggtattggtggtgagattatccaccagcctaccacccagactgggaccgtttacatccttctgcagggttccactatcttccatgaccgcagaagagaccaggtgttgccttttcaggccgctgctccgctcaactaccattacgcgtaccgcctcgacaccggcgactccactctcacaaacgaaccctctgaacagtttgccaacaagttcatgcagatgacacccttcacccgttggaggcttcgtctgtctgcgtccgcaaaagagaatgcaggattagcctttcccacggctacagcacttgactccactacccagattgtcatcactttccatgttacggccatcagacaaattgactggcggcacgacgaagag

SEQ ID NO: 197 - DNA, 2601 bp, Artificial Sequence
  Synthetic
atggctctcgtggattacggcaagcttttcgaggatctgaaccagataagcatgggtgtactggatcgggtagagttttcagaggtgatggtgatccacaggatgtatgtgaggctagctgatctgaatgtggggcagctcgagggagccgagaaagtgaagcgcttgtatatttttggcgacgttatcgagctaccagtcgtggaatggcggtggccgccgcaaataccaggatcggtgacggtgatcatattgtgtcgtcttcttcaatggccaactgatgggaggcagtcggacaccgagctccacctgacattcatgaagttgcatgccatacaacgagaggaaaatcggtgggagataaccgcagcagatggcatgaactggggagtttacatacacgcagaggaagtacaggttggcgtgctgacaatgtcatggtcttcggtacttagagtttcggcacttcgctctgttataacctccggctttcgcgccgttagtgtgtttgaggtaccgggaagtgtaaggtccacccttggagctactttaaggcccgatcacgccttatatagtacaactatgcaagccacacccaacgcatcgcatattagtgcttttaaccttcgcatagtttccccgtcggcatatcgtgtttgtcctctccaaaatgacacagatacctacttaggtattccagcagacgtggcggcagttcttccagtagacgtggtgactgatcctaacatcttgctgggcatgcagacaacggtacacattgcggagctagtcaaggcatgtcatccgtcacccgatgttgtgagcgctgtaggggagcacctgaactggctcaacaaactcttactcccacttaaggaatcgactcagttgcaaggaagcgagtcgtacaaggagtgccttgcactcttgggtcgtgttcacgctgcgatgaagatggtgagaattggcttagtagtgccccagctgcaatacagaatgtacggtagcctcatcaaccaaatggcccaagtagcacaaaactacgaccgagaattcaagcaattcaaattattcatcatccaaaatcaaatccttggcagctatttgctgcagcagaacagggcatttgctgagagggagctgcagatggagagctttcatgctgctgtcatttctcaaagaagggaggagttggacaatacattcgcaaagatggaccgattgagcgggcaaatggaggcagagagtagtgcaatggagcaagccaaaaaggaaatggacgaaggattgaggcagttccagaataggcaagttgcgaacgccctctttgccgttcttagcgctgtagctcagattgggcttgcattccttacggctggtgcaacggctcctggagctgtggcgtcggcggggcaagctgtgagcatagcaggtcaggcggcgcaaggtctgcgaagggtggtggaaattctagagcagctggaggctgtgatggaggttgtggctgctgtgaaggacctcgtggattcattggaacaggtaggtcagattgtggacgcaccggtgatgccggaattgccctcagaggcggactggtccatttttgtgaacgaggtggaggccgtggcagagggcatgccaacggaagtctcggaggttccggtgtggagggccaagtgcaagaatgtggctgcactgggtcgggagatgagcatcacggcagtacagatgtcggagctgcagtatgacatctgggtgcaaggcatgatgcgggatatggctcgaagccaggcagacaggctggccgcaattcaacccgcggaccttaccaactatttggagatggctacccagatggatatgcggactacgaggatgctgctggggctcctcaacatattgcgcatccagaatgcggcgctcaggtacgagtatcttctaatgcccacggagctcacaacatggccactgggtatggataccgtgggtgacttgctcatcgcgcaggagaatgctgcactgataggattaatgcagctagggccctcatctgatttcacgagcaggcatgtggtgaaagacatacctgtgaacttgctgctcgatggcgaggattgggagtttgagattcctgtgcaagctggcatgtccagcttcccttccagctggtctcgcgtccgtattcggcacctggagatgcactttgtgaaggaggccagcggtattggtggtgagattatccaccagcctaccacccagactgggaccgtttacatccttctgcagggttccactatcttccatgaccgcagaagagaccaggtgttgccttttcaggccgctgctccgctcaactaccattacgcgtaccgcctcgacaccggcgactccactctcacaaacgaaccctctgaacagtttgccaacaagttcatgcagatgacacccttcacccgttggaggcttcgtctgtctgcgtccgcaaaagagaatgcaggattagcctttcccacggctacagcacttgactccactacccagattgtcatcactttccatgttacggccatcagacaaattgactggcggcacgacgaagag

SEQ ID NO: 198 - DNA, 2601 bp, Artificial Sequence
  Synthetic
atggctctcgtggattacggcaagcttttcgaggatctgaaccagataagcatgggtgtactggatcgggtagagttttcagaggtgatggtgatccacaggatgtatgtgaggctagctgatctgaatgtggggcagctcgagggagccgagaaagtgaagcgcttgtatattttttccgacattatcgtgctaccagtcgtggaatggcggtggccgccgcaaataccaggatcggtgacggtgatcatattgtgtcgtcttcttcaatggccaactgatgggaggcagtcggacaccgagctccacctgacattcatgaagttgcatgccatacaacgagaggaaaatcggtgggagataaccgcagcagatggcatgaactggggagtttacatacacgcagaggaagtacaggttggcgtgctgacaatgtcatggtcttcggtacttagagtttcggcacttcgctctgttataacctccggctttcgcgccgttagtgtgtttgaggtaccgggaagtgtaaggtccacccttggagctactttaaggcccgatcacgccttatatagtacaactatgcaagccacacccaacgcatcgcatattagtgcttttaaccttcgcatagtttccccgtcggcatatcgtgtttgtcctctccaaaatgacacagatacctacttaggtattccagcagacgtggcggcagttcttccagtagacgtggtgactgatcctaacatcttgctgggcatgcagacaacggtacacattgcggagctagtcaaggcatgtcatccgtcacccgatgttgtgagcgctgtaggggagcacctgaactggctcaacaaactcttactcccacttaaggaatcgactcagttgcaaggaagcgagtcgtacaaggagtgccttgcactcttgggtcgtgttcacgctgcgatgaagatggtgagaattggcttagtagtgccccagctgcaatacagaatgtacggtagcctcatcaaccaaatggcccaagtagcacaaaactacgaccgagaattcaagcaattcaaattattcatcatccaaaatcaaatccttggcagctatttgctgcagcagaacagggcatttgctgagagggagctgcagatggagagctttcatgctgctgtcatttctcaaagaagggaggagttggacaatacattcgcaaagatggaccgattgagcgggcaaatggaggcagagagtagtgcaatggagcaagccaaaaaggaaatggacgaaggattgaggcagttccagaataggcaagttgcgaacgccctctttgccgttcttagcgctgtagctcagattgggcttgcattccttacggctggtgcaacggctcctggagctgtggcgtcggcggggcaagctgtgagcatagcaggtcaggcggcgcaaggtctgcgaagggtggtggaaattctagagcagctggaggctgtgatggaggttgtggctgctgtgaaggacctcgtggattcattggaacaggtaggtcagattgtggacgcaccggtgatgccggaattgccctcagaggcggactggtccatttttgtgaacgaggtggaggccgtggcagagggcatgccaacggaagtctcggaggttccggtgtggagggccaagtgcaagaatgtggctgcactgggtcgggagatgagcatcacggcagtacagatgtcggagctgcagtatgacatctgggtgcaaggcatgatgcgggatatggctcgaagccaggcagacaggctggccgcaattcaacccgcggaccttaccaactatttggagatggctacccagatggatatgcggactacgaggatgctgctggggctcctcaacatattgcgcatccagaatgcggcgctcaggtacgagtatcttctaatgcccacggagctcacaacatggccactgggtatggataccgtgggtgacttgctcatcgcgcaggagaatgctgcactgataggattaatgcagctagggccctcatctgatttcacgagcaggcatgtggtgaaagacatacctgtgaacttgctgctcgatggcgaggattgggagtttgagattcctgtgcaagctggcatgtccagcttcccttccagctggtctcgcgtccgtattcggcacctggagatgcactttgtgaaggaggccagcggtattggtggtgagattatccaccagcctaccacccagactgggaccgtttacatccttctgcagggttccactatcttccatgaccgcagaagagaccaggtgttgccttttcaggccgctgctccgctcaactaccattacgcgtaccgcctcgacaccggcgactccactctcacaaacgaaccctctgaacagtttgccaacaagttcatgcagatgacacccttcacccgttggaggcttcgtctgtctgcgtccgcaaaagagaatgcaggattagcctttcccacggctacagcacttgactccactacccagattgtcatcactttccatgttacggccatcagacaaattgactggcggcacgacgaagag

SEQ ID NO: 199 - DNA, 2601 bp, Artificial Sequence
  Synthetic
atggctctcgtggattacggcaagcttttcgaggatctgaaccagataagcatgggtgtactggatcgggtagagttttcagaggtgatggtgatccacaggatgtatgtgaggctagctgatctgaatgtggggcagctcgagggagccgagaaagtgaagcggttgtatatttttagcgacattctcgagctaccagtcgtggaatggcggtggccgccgcaaataccgggatcggtgacggtgatcatattgtgtcgtcttcttcaatggccaactgatgggaggcagtcggacaccgagctccacctgacattcatgaagttgcatgccatacaacgagaggaaaatcggtgggagataaccgcagcagatggcatgaactggggagtttacatacacgcagaggaagtacaggttggcgtgctgacaatgtcatggtcttcggtacttagagtttcggcacttcgctctgttataacctccggctttcgcgccgttagtgtgtttgaggtaccgggaagtgtaaggtccacccttggagctactttaaggcccgatcacgccttatatagtacaactatgcaagccacacccaacgcatcgcatattagtgcttttaaccttcgcatagtttccccgtcggcatatcgtgtttgtcctctccaaaatgacacagatacctacttaggtattccagcagacgtggcggcagttcttccagtagacgtggtgactgatcctaacatcttgctgggcatgcagacaacggtacacattgcggagctagtcaaggcatgtcatccgtcacccgatgttgtgagcgctgtaggggagcacctgaactggctcaacaaactcttactcccacttaaggaatcgactcagttgcaaggaagcgagtcgtacaaggagtgccttgcactcttgggtcgtgttcacgctgcgatgaagatggtgagaattggcttagtagtgccccagctgcaatacagaatgtacggtagcctcatcaaccaaatggcccaagtagcacaaaactacgaccgagaattcaagcaattcaaattattcatcatccaaaatcaaatccttggcagctatttgctgcagcagaacagggcatttgctgagagggagctgcagatggagagctttcatgctgctgtcatttctcaaagaagggaggagttggacaatacattcgcaaagatggaccgattgagcgggcaaatggaggcagagagtagtgcaatggagcaagccaaaaaggaaatggacgaaggattgaggcagttccagaataggcaagttgcgaacgccctctttgccgttcttagcgctgtagctcagattgggcttgcattccttacggctggtgcaacggctcctggagctgtggcgtcggcggggcaagctgtgagcatagcaggtcaggcggcgcaaggtctgcgaagggtggtggaaattctagagcagctggaggctgtgatggaggttgtggctgctgtgaaggacctcgtggattcattggaacaggtaggtcagattgtggacgcaccggtgatgccggaattgccctcagaggcggactggtccatttttgtgaacgaggtggaggccgtggcagagggcatgccaacggaagtctcggaggttccggtgtggagggccaagtgcaagaatgtggctgcactgggtcgggagatgagcatcacggcagtacagatgtcggagctgcagtatgacatctgggtgcaaggcatgatgcgggatatggctcgaagccaggcagacaggctggccgcaattcaacccgcggaccttaccaactatttggagatggctacccagatggatatgcggactacgaggatgctgctggggctcctcaacatattgcgcatccagaatgcggcgctcaggtacgagtatcttctaatgcccacggagctcacaacatggccactgggtatggataccgtgggtgacttgctcatcgcgcaggagaatgctgcactgataggattaatgcagctagggccctcatctgatttcacgagcaggcatgtggtgaaagacatacctgtgaacttgctgctcgatggcgaggattgggagtttgagattcctgtgcaagctggcatgtccagcttcccttccagctggtctcgcgtccgtattcggcacctggagatgcactttgtgaaggaggccagcggtattggtggtgagattatccaccagcctaccacccagactgggaccgtttacatccttctgcagggttccactatcttccatgaccgcagaagagaccaggtgttgccttttcaggccgctgctccgctcaactaccattacgcgtaccgcctcgacaccggcgactccactctcacaaacgaaccctctgaacagtttgccaacaagttcatgcagatgacacccttcacccgttggaggcttcgtctgtctgcgtccgcaaaagagaatgcaggattagcctttcccacggctacagcacttgactccactacccagattgtcatcactttccatgttacggccatcagacaaattgactggcggcacgacgaagag

SEQ ID NO: 200 - DNA, 2601 bp, Artificial Sequence
  Synthetic
atggctctcgtggattacggcaagcttttcgaggatctgaaccagataagcatgggtgtactggatcgggtagagttttcagaggtgatggtgatccacaggatgtatgtgaggctagctgatctgaatgtggggcagctagagggagccgagaaagtgaagcgcttgtatatttttagcgacgttatcgtgctaccagtcgtggaatggcggtggccgccgcaaataccaggatcggtgacggtgatcatattgtgtcgtcttcttcaatggccaactgatgggaggcagtcggacaccgagctccacctgacattcatgaagttgcatgccatacaacgagaggaaaatcggtgggagataaccgcagcagatggcatgaactggggagtttacatacacgcagaggaagtacaggttggcgtgctgacaatgtcatggtcttcggtacttagagtttcggcacttcgctctgttataacctccggctttcgcgccgttagtgtgtttgaggtaccgggaagtgtaaggtccacccttggagctactttaaggcccgatcacgccttatatagtacaactatgcaagccacacccaacgcatcgcatattagtgcttttaaccttcgcatagtttccccgtcggcatatcgtgtttgtcctctccaaaatgacacagatacctacttaggtattccagcagacgtggcggcagttcttccagtagacgtggtgactgatcctaacatcttgctgggcatgcagacaacggtacacattgcggagctagtcaaggcatgtcatccgtcacccgatgttgtgagcgctgtaggggagcacctgaactggctcaacaaactcttactcccacttaaggaatcgactcagttgcaaggaagcgagtcgtacaaggagtgccttgcactcttgggtcgtgttcacgctgcgatgaagatggtgagaattggcttagtagtgccccagctgcaatacagaatgtacggtagcctcatcaaccaaatggcccaagtagcacaaaactacgaccgagaattcaagcaattcaaattattcatcatccaaaatcaaatccttggcagctatttgctgcagcagaacagggcatttgctgagagggagctgcagatggagagctttcatgctgctgtcatttctcaaagaagggaggagttggacaatacattcgcaaagatggaccgattgagcgggcaaatggaggcagagagtagtgcaatggagcaagccaaaaaggaaatggacgaaggattgaggcagttccagaataggcaagttgcgaacgccctctttgccgttcttagcgctgtagctcagattgggcttgcattccttacggctggtgcaacggctcctggagctgtggcgtcggcggggcaagctgtgagcatagcaggtcaggcggcgcaaggtctgcgaagggtggtggaaattctagagcagctggaggctgtgatggaggttgtggctgctgtgaaggacctcgtggattcattggaacaggtaggtcagattgtggacgcaccggtgatgccggaattgccctcagaggcggactggtccatttttgtgaacgaggtggaggccgtggcagagggcatgccaacggaagtctcggaggttccggtgtggagggccaagtgcaagaatgtggctgcactgggtcgggagatgagcatcacggcagtacagatgtcggagctgcagtatgacatctgggtgcaaggcatgatgcgggatatggctcgaagccaggcagacaggctggccgcaattcaacccgcggaccttaccaactatttggagatggctacccagatggatatgcggactacgaggatgctgctggggctcctcaacatattgcgcatccagaatgcggcgctcaggtacgagtatcttctaatgcccacggagctcacaacatggccactgggtatggataccgtgggtgacttgctcatcgcgcaggagaatgctgcactgataggattaatgcagctagggccctcatctgatttcacgagcaggcatgtggtgaaagacatacctgtgaacttgctgctcgatggcgaggattgggagtttgagattcctgtgcaagctggcatgtccagcttcccttccagctggtctcgcgtccgtattcggcacctggagatgcactttgtgaaggaggccagcggtattggtggtgagattatccaccagcctaccacccagactgggaccgtttacatccttctgcagggttccactatcttccatgaccgcagaagagaccaggtgttgccttttcaggccgctgctccgctcaactaccattacgcgtaccgcctcgacaccggcgactccactctcacaaacgaaccctctgaacagtttgccaacaagttcatgcagatgacacccttcacccgttggaggcttcgtctgtctgcgtccgcaaaagagaatgcaggattagcctttcccacggctacagcacttgactccactacccagattgtcatcactttccatgttacggccatcagacaaattgactggcggcacgacgaagag

SEQ ID NO: 201 - DNA, 2601 bp, Artificial Sequence
  Synthetic
atggctctcgtggattacggcaagcttttcgaggatctgaaccagataagcatgggtgtactggatcgggtagagttttcagaggtgatggtgatccacaggatgtatgtgaggctagctgatctgaatgtggggcagctcgagggagccgagaaagtgaagcgcttgtatatttttaccgacgttatcgagctaccagtcgtggaatggcggtggccgccgcaaataccaggatcggtgacggtgatcatattgtgtcgtcttcttcaatggccaactgatgggaggcagtcggacaccgagctccacctgacattcatgaagttgcatgccatacaacgagaggaaaatcggtgggagataaccgcagcagatggcatgaactggggagtttacatacacgcagaggaagtacaggttggcgtgctgacaatgtcatggtcttcggtacttagagtttcggcacttcgctctgttataacctccggctttcgcgccgttagtgtgtttgaggtaccgggaagtgtaaggtccacccttggagctactttaaggcccgatcacgccttatatagtacaactatgcaagccacacccaacgcatcgcatattagtgcttttaaccttcgcatagtttccccgtcggcatatcgtgtttgtcctctccaaaatgacacagatacctacttaggtattccagcagacgtggcggcagttcttccagtagacgtggtgactgatcctaacatcttgctgggcatgcagacaacggtacacattgcggagctagtcaaggcatgtcatccgtcacccgatgttgtgagcgctgtaggggagcacctgaactggctcaacaaactcttactcccacttaaggaatcgactcagttgcaaggaagcgagtcgtacaaggagtgccttgcactcttgggtcgtgttcacgctgcgatgaagatggtgagaattggcttagtagtgccccagctgcaatacagaatgtacggtagcctcatcaaccaaatggcccaagtagcacaaaactacgaccgagaattcaagcaattcaaattattcatcatccaaaatcaaatccttggcagctatttgctgcagcagaacagggcatttgctgagagggagctgcagatggagagctttcatgctgctgtcatttctcaaagaagggaggagttggacaatacattcgcaaagatggaccgattgagcgggcaaatggaggcagagagtagtgcaatggagcaagccaaaaaggaaatggacgaaggattgaggcagttccagaataggcaagttgcgaacgccctctttgccgttcttagcgctgtagctcagattgggcttgcattccttacggctggtgcaacggctcctggagctgtggcgtcggcggggcaagctgtgagcatagcaggtcaggcggcgcaaggtctgcgaagggtggtggaaattctagagcagctggaggctgtgatggaggttgtggctgctgtgaaggacctcgtggattcattggaacaggtaggtcagattgtggacgcaccggtgatgccggaattgccctcagaggcggactggtccatttttgtgaacgaggtggaggccgtggcagagggcatgccaacggaagtctcggaggttccggtgtggagggccaagtgcaagaatgtggctgcactgggtcgggagatgagcatcacggcagtacagatgtcggagctgcagtatgacatctgggtgcaaggcatgatgcgggatatggctcgaagccaggcagacaggctggccgcaattcaacccgcggaccttaccaactatttggagatggctacccagatggatatgcggactacgaggatgctgctggggctcctcaacatattgcgcatccagaatgcggcgctcaggtacgagtatcttctaatgcccacggagctcacaacatggccactgggtatggataccgtgggtgacttgctcatcgcgcaggagaatgctgcactgataggattaatgcagctagggccctcatctgatttcacgagcaggcatgtggtgaaagacatacctgtgaacttgctgctcgatggcgaggattgggagtttgagattcctgtgcaagctggcatgtccagcttcccttccagctggtctcgcgtccgtattcggcacctggagatgcactttgtgaaggaggccagcggtattggtggtgagattatccaccagcctaccacccagactgggaccgtttacatccttctgcagggttccactatcttccatgaccgcagaagagaccaggtgttgccttttcaggccgctgctccgctcaactaccattacgcgtaccgcctcgacaccggcgactccactctcacaaacgaaccctctgaacagtttgccaacaagttcatgcagatgacacccttcacccgttggaggcttcgtctgtctgcgtccgcaaaagagaatgcaggattagcctttcccacggctacagcacttgactccactacccagattgtcatcactttccatgttacggccatcagacaaattgactggcggcacgacgaagag

SEQ ID NO: 202 - DNA, 2601 bp, Artificial Sequence
  Synthetic
atggctctcgtggattacggcaagcttttcgaggatctgaaccagataagcatgggtgtactggatcgggtagagttttcagaggtgatggtgatccacaggatgtatgtgaggctagctgatctgaatgtggggcagctcgagggagccgagaaagtgaagcgcttgtatgttttttgcgacattatcgagctaccagtcgtggaatggcggtggccgccgcaaataccaggatcggtgacggtgatcatattgtgtcgtcttcttcaatggccaactgatgggaggcagtcggacaccgagctccacctgacattcatgaagttgcatgccatacaacgagaggaaaatcggtgggagataaccgcagcagatggcatgaactggggagtttacatacacgcagaggaagtacaggttggcgtgctgacaatgtcatggtcttcggtacttagagtttcggcacttcgctctgttataacctccggctttcgcgccgttagtgtgtttgaggtaccgggaagtgtaaggtccacccttggagctactttaaggcccgatcacgccttatatagtacaactatgcaagccacacccaacgcatcgcatattagtgcttttaaccttcgcatagtttccccgtcggcatatcgtgtttgtcctctccaaaatgacacagatacctacttaggtattccagcagacgtggcggcagttcttccagtagacgtggtgactgatcctaacatcttgctgggcatgcagacaacggtacacattgcggagctagtcaaggcatgtcatccgtcacccgatgttgtgagcgctgtaggggagcacctgaactggctcaacaaactcttactcccacttaaggaatcgactcagttgcaaggaagcgagtcgtacaaggagtgccttgcactcttgggtcgtgttcacgctgcgatgaagatggtgagaattggcttagtagtgccccagctgcaatacagaatgtacggtagcctcatcaaccaaatggcccaagtagcacaaaactacgaccgagaattcaagcaattcaaattattcatcatccaaaatcaaatccttggcagctatttgctgcagcagaacagggcatttgctgagagggagctgcagatggagagctttcatgctgctgtcatttctcaaagaagggaggagttggacaatacattcgcaaagatggaccgattgagcgggcaaatggaggcagagagtagtgcaatggagcaagccaaaaaggaaatggacgaaggattgaggcagttccagaataggcaagttgcgaacgccctctttgccgttcttagcgctgtagctcagattgggcttgcattccttacggctggtgcaacggctcctggagctgtggcgtcggcggggcaagctgtgagcatagcaggtcaggcggcgcaaggtctgcgaagggtggtggaaattctagagcagctggaggctgtgatggaggttgtggctgctgtgaaggacctcgtggattcattggaacaggtaggtcagattgtggacgcaccggtgatgccggaattgccctcagaggcggactggtccatttttgtgaacgaggtggaggccgtggcagagggcatgccaacggaagtctcggaggttccggtgtggagggccaagtgcaagaatgtggctgcactgggtcgggagatgagcatcacggcagtacagatgtcggagctgcagtatgacatctgggtgcaaggcatgatgcgggatatggctcgaagccaggcagacaggctggccgcaattcaacccgcggaccttaccaactatttggagatggctacccagatggatatgcggactacgaggatgctgctggggctcctcaacatattgcgcatccagaatgcggcgctcaggtacgagtatcttctaatgcccacggagctcacaacatggccactgggtatggataccgtgggtgacttgctcatcgcgcaggagaatgctgcactgataggattaatgcagctagggccctcatctgatttcacgagcaggcatgtggtgaaagacatacctgtgaacttgctgctcgatggcgaggattgggagtttgagattcctgtgcaagctggcatgtccagcttcccttccagctggtctcgcgtccgtattcggcacctggagatgcactttgtgaaggaggccagcggtattggtggtgagattatccaccagcctaccacccagactgggaccgtttacatccttctgcagggttccactatcttccatgaccgcagaagagaccaggtgttgccttttcaggccgctgctccgctcaactaccattacgcgtaccgcctcgacaccggcgactccactctcacaaacgaaccctctgaacagtttgccaacaagttcatgcagatgacacccttcacccgttggaggcttcgtctgtctgcgtccgcaaaagagaatgcaggattagcctttcccacggctacagcacttgactccactacccagattgtcatcactttccatgttacggccatcagacaaattgactggcggcacgacgaagag

SEQ ID NO: 203 - DNA, 2601 bp, Artificial Sequence
  Synthetic
atggctctcgtggattacggcaagcttttcgaggatctgaaccagataagcatgggtgtactggatcgggtagagttttcagaggtgatggtgatccacaggatgtatgtgaggctagctgatctgaatgtggggcagctcgagggagccgagaaagtgaagcggttgtatgttttttgcgacattatcgtgctaccagtcgtggaatggcggtggccgccgcaaataccaggatcggtgacggtgatcatattgtgtcgtcttcttcaatggccaactgatgggaggcagtcggacaccgagctccacctgacattcatgaagttgcatgccatacaacgagaggaaaatcggtgggagataaccgcagcagatggcatgaactggggagtttacatacacgcagaggaagtacaggttggcgtgctgacaatgtcatggtcttcggtacttagagtttcggcacttcgctctgttataacctccggctttcgcgccgttagtgtgtttgaggtaccgggaagtgtaaggtccacccttggagctactttaaggcccgatcacgccttatatagtacaactatgcaagccacacccaacgcatcgcatattagtgcttttaaccttcgcatagtttccccgtcggcatatcgtgtttgtcctctccaaaatgacacagatacctacttaggtattccagcagacgtggcggcagttcttccagtagacgtggtgactgatcctaacatcttgctgggcatgcagacaacggtacacattgcggagctagtcaaggcatgtcatccgtcacccgatgttgtgagcgctgtaggggagcacctgaactggctcaacaaactcttactcccacttaaggaatcgactcagttgcaaggaagcgagtcgtacaaggagtgccttgcactcttgggtcgtgttcacgctgcgatgaagatggtgagaattggcttagtagtgccccagctgcaatacagaatgtacggtagcctcatcaaccaaatggcccaagtagcacaaaactacgaccgagaattcaagcaattcaaattattcatcatccaaaatcaaatccttggcagctatttgctgcagcagaacagggcatttgctgagagggagctgcagatggagagctttcatgctgctgtcatttctcaaagaagggaggagttggacaatacattcgcaaagatggaccgattgagcgggcaaatggaggcagagagtagtgcaatggagcaagccaaaaaggaaatggacgaaggattgaggcagttccagaataggcaagttgcgaacgccctctttgccgttcttagcgctgtagctcagattgggcttgcattccttacggctggtgcaacggctcctggagctgtggcgtcggcggggcaagctgtgagcatagcaggtcaggcggcgcaaggtctgcgaagggtggtggaaattctagagcagctggaggctgtgatggaggttgtggctgctgtgaaggacctcgtggattcattggaacaggtaggtcagattgtggacgcaccggtgatgccggaattgccctcagaggcggactggtccatttttgtgaacgaggtggaggccgtggcagagggcatgccaacggaagtctcggaggttccggtgtggagggccaagtgcaagaatgtggctgcactgggtcgggagatgagcatcacggcagtacagatgtcggagctgcagtatgacatctgggtgcaaggcatgatgcgggatatggctcgaagccaggcagacaggctggccgcaattcaacccgcggaccttaccaactatttggagatggctacccagatggatatgcggactacgaggatgctgctggggctcctcaacatattgcgcatccagaatgcggcgctcaggtacgagtatcttctaatgcccacggagctcacaacatggccactgggtatggataccgtgggtgacttgctcatcgcgcaggagaatgctgcactgataggattaatgcagctagggccctcatctgatttcacgagcaggcatgtggtgaaagacatacctgtgaacttgctgctcgatggcgaggattgggagtttgagattcctgtgcaagctggcatgtccagcttcccttccagctggtctcgcgtccgtattcggcacctggagatgcactttgtgaaggaggccagcggtattggtggtgagattatccaccagcctaccacccagactgggaccgtttacatccttctgcagggttccactatcttccatgaccgcagaagagaccaggtgttgccttttcaggccgctgctccgctcaactaccattacgcgtaccgcctcgacaccggcgactccactctcacaaacgaaccctctgaacagtttgccaacaagttcatgcagatgacacccttcacccgttggaggcttcgtctgtctgcgtccgcaaaagagaatgcaggattagcctttcccacggctacagcacttgactccactacccagattgtcatcactttccatgttacggccatcagacaaattgactggcggcacgacgaagag

SEQ ID NO: 204 - DNA, 2601 bp, Artificial Sequence
  Synthetic
atggctctcgtggattacggcaagcttttcgaggatctgaaccagataagcatgggtgtactggatcgggtagagttttcagaggtgatggtgatccacaggatgtatgtgaggctagctgatctgaatgtggggcagctcgagggagccgagaaagtgaagcgcttgtatgtttttggcgacattgtcgagctaccagtcgtggaatggcggtggccgccgcaaataccaggatcggtgacggtgatcatattgtgtcgtcttcttcaatggccaactgatgggaggcagtcggacaccgagctccacctgacattcatgaagttgcatgccatacaacgagaggaaaatcggtgggagataaccgcagcagatggcatgaactggggagtttacatacacgcagaggaagtacaggttggcgtgctgacaatgtcatggtcttcggtacttagagtttcggcacttcgctctgttataacctccggctttcgcgccgttagtgtgtttgaggtaccgggaagtgtaaggtccacccttggagctactttaaggcccgatcacgccttatatagtacaactatgcaagccacacccaacgcatcgcatattagtgcttttaaccttcgcatagtttccccgtcggcatatcgtgtttgtcctctccaaaatgacacagatacctacttaggtattccagcagacgtggcggcagttcttccagtagacgtggtgactgatcctaacatcttgctgggcatgcagacaacggtacacattgcggagctagtcaaggcatgtcatccgtcacccgatgttgtgagcgctgtaggggagcacctgaactggctcaacaaactcttactcccacttaaggaatcgactcagttgcaaggaagcgagtcgtacaaggagtgccttgcactcttgggtcgtgttcacgctgcgatgaagatggtgagaattggcttagtagtgccccagctgcaatacagaatgtacggtagcctcatcaaccaaatggcccaagtagcacaaaactacgaccgagaattcaagcaattcaaattattcatcatccaaaatcaaatccttggcagctatttgctgcagcagaacagggcatttgctgagagggagctgcagatggagagctttcatgctgctgtcatttctcaaagaagggaggagttggacaatacattcgcaaagatggaccgattgagcgggcaaatggaggcagagagtagtgcaatggagcaagccaaaaaggaaatggacgaaggattgaggcagttccagaataggcaagttgcgaacgccctctttgccgttcttagcgctgtagctcagattgggcttgcattccttacggctggtgcaacggctcctggagctgtggcgtcggcggggcaagctgtgagcatagcaggtcaggcggcgcaaggtctgcgaagggtggtggaaattctagagcagctggaggctgtgatggaggttgtggctgctgtgaaggacctcgtggattcattggaacaggtaggtcagattgtggacgcaccggtgatgccggaattgccctcagaggcggactggtccatttttgtgaacgaggtggaggccgtggcagagggcatgccaacggaagtctcggaggttccggtgtggagggccaagtgcaagaatgtggctgcactgggtcgggagatgagcatcacggcagtacagatgtcggagctgcagtatgacatctgggtgcaaggcatgatgcgggatatggctcgaagccaggcagacaggctggccgcaattcaacccgcggaccttaccaactatttggagatggctacccagatggatatgcggactacgaggatgctgctggggctcctcaacatattgcgcatccagaatgcggcgctcaggtacgagtatcttctaatgcccacggagctcacaacatggccactgggtatggataccgtgggtgacttgctcatcgcgcaggagaatgctgcactgataggattaatgcagctagggccctcatctgatttcacgagcaggcatgtggtgaaagacatacctgtgaacttgctgctcgatggcgaggattgggagtttgagattcctgtgcaagctggcatgtccagcttcccttccagctggtctcgcgtccgtattcggcacctggagatgcactttgtgaaggaggccagcggtattggtggtgagattatccaccagcctaccacccagactgggaccgtttacatccttctgcagggttccactatcttccatgaccgcagaagagaccaggtgttgccttttcaggccgctgctccgctcaactaccattacgcgtaccgcctcgacaccggcgactccactctcacaaacgaaccctctgaacagtttgccaacaagttcatgcagatgacacccttcacccgttggaggcttcgtctgtctgcgtccgcaaaagagaatgcaggattagcctttcccacggctacagcacttgactccactacccagattgtcatcactttccatgttacggccatcagacaaattgactggcggcacgacgaagag

SEQ ID NO: 205 - DNA, 2601 bp, Artificial Sequence
  Synthetic
atggctctcgtggattacggcaagcttttcgaggatctgaaccagataagcatgggtgtactggatcgggtagagttttcagaggtgatggtgatccacaggatgtatgtgaggctagctgatctgaatgtggggcagctcgagggagccgagaaagtgaagcgcttgtatgtttttggcgacgttgtcgagctaccagtcgtggaatggcggtggccgccgcaaataccaggatcggtgacggtgatcatattgtgtcgtcttcttcaatggccaactgatgggaggcagtcggacaccgagctccacctgacattcatgaagttgcatgccatacaacgagaggaaaatcggtgggagataaccgcagcagatggcatgaactggggagtttacatacacgcagaggaagtacaggttggcgtgctgacaatgtcatggtcttcggtacttagagtttcggcacttcgctctgttataacctccggctttcgcgccgttagtgtgtttgaggtaccgggaagtgtaaggtccacccttggagctactttaaggcccgatcacgccttatatagtacaactatgcaagccacacccaacgcatcgcatattagtgcttttaaccttcgcatagtttccccgtcggcatatcgtgtttgtcctctccaaaatgacacagatacctacttaggtattccagcagacgtggcggcagttcttccagtagacgtggtgactgatcctaacatcttgctgggcatgcagacaacggtacacattgcggagctagtcaaggcatgtcatccgtcacccgatgttgtgagcgctgtaggggagcacctgaactggctcaacaaactcttactcccacttaaggaatcgactcagttgcaaggaagcgagtcgtacaaggagtgccttgcactcttgggtcgtgttcacgctgcgatgaagatggtgagaattggcttagtagtgccccagctgcaatacagaatgtacggtagcctcatcaaccaaatggcccaagtagcacaaaactacgaccgagaattcaagcaattcaaattattcatcatccaaaatcaaatccttggcagctatttgctgcagcagaacagggcatttgctgagagggagctgcagatggagagctttcatgctgctgtcatttctcaaagaagggaggagttggacaatacattcgcaaagatggaccgattgagcgggcaaatggaggcagagagtagtgcaatggagcaagccaaaaaggaaatggacgaaggattgaggcagttccagaataggcaagttgcgaacgccctctttgccgttcttagcgctgtagctcagattgggcttgcattccttacggctggtgcaacggctcctggagctgtggcgtcggcggggcaagctgtgagcatagcaggtcaggcggcgcaaggtctgcgaagggtggtggaaattctagagcagctggaggctgtgatggaggttgtggctgctgtgaaggacctcgtggattcattggaacaggtaggtcagattgtggacgcaccggtgatgccggaattgccctcagaggcggactggtccatttttgtgaacgaggtggaggccgtggcagagggcatgccaacggaagtctcggaggttccggtgtggagggccaagtgcaagaatgtggctgcactgggtcgggagatgagcatcacggcagtacagatgtcggagctgcagtatgacatctgggtgcaaggcatgatgcgggatatggctcgaagccaggcagacaggctggccgcaattcaacccgcggaccttaccaactatttggagatggctacccagatggatatgcggactacgaggatgctgctggggctcctcaacatattgcgcatccagaatgcggcgctcaggtacgagtatcttctaatgcccacggagctcacaacatggccactgggtatggataccgtgggtgacttgctcatcgcgcaggagaatgctgcactgataggattaatgcagctagggccctcatctgatttcacgagcaggcatgtggtgaaagacatacctgtgaacttgctgctcgatggcgaggattgggagtttgagattcctgtgcaagctggcatgtccagcttcccttccagctggtctcgcgtccgtattcggcacctggagatgcactttgtgaaggaggccagcggtattggtggtgagattatccaccagcctaccacccagactgggaccgtttacatccttctgcagggttccactatcttccatgaccgcagaagagaccaggtgttgccttttcaggccgctgctccgctcaactaccattacgcgtaccgcctcgacaccggcgactccactctcacaaacgaaccctctgaacagtttgccaacaagttcatgcagatgacacccttcacccgttggaggcttcgtctgtctgcgtccgcaaaagagaatgcaggattagcctttcccacggctacagcacttgactccactacccagattgtcatcactttccatgttacggccatcagacaaattgactggcggcacgacgaagag

SEQ ID NO: 206 - DNA, 2601 bp, Artificial Sequence
  Synthetic
atggctctcgtggattacggcaagcttttcgaggatctgaaccagataagcatgggtgtactggatcgggtagagttttcagaggtgatggtgatccacaggatgtatgtgaggctagctgatctgaatgtggggcagctcgagggagccgagaaagtgaagcgcttgtatgtttttagcgacattatcgagctaccagtcgtggaatggcggtggccgccgcaaataccaggatcggtgacggtgatcatattgtgtcgtcttcttcaatggccaactgatgggaggcagtcggacaccgagctccacctgacattcatgaagttgcatgccatacaacgagaggaaaatcggtgggagataaccgcagcagatggcatgaactggggagtttacatacacgcagaggaagtacaggttggcgtgctgacaatgtcatggtcttcggtacttagagtttcggcacttcgctctgttataacctccggctttcgcgccgttagtgtgtttgaggtaccgggaagtgtaaggtccacccttggagctactttaaggcccgatcacgccttatatagtacaactatgcaagccacacccaacgcatcgcatattagtgcttttaaccttcgcatagtttccccgtcggcatatcgtgtttgtcctctccaaaatgacacagatacctacttaggtattccagcagacgtggcggcagttcttccagtagacgtggtgactgatcctaacatcttgctgggcatgcagacaacggtacacattgcggagctagtcaaggcatgtcatccgtcacccgatgttgtgagcgctgtaggggagcacctgaactggctcaacaaactcttactcccacttaaggaatcgactcagttgcaaggaagcgagtcgtacaaggagtgccttgcactcttgggtcgtgttcacgctgcgatgaagatggtgagaattggcttagtagtgccccagctgcaatacagaatgtacggtagcctcatcaaccaaatggcccaagtagcacaaaactacgaccgagaattcaagcaattcaaattattcatcatccaaaatcaaatccttggcagctatttgctgcagcagaacagggcatttgctgagagggagctgcagatggagagctttcatgctgctgtcatttctcaaagaagggaggagttggacaatacattcgcaaagatggaccgattgagcgggcaaatggaggcagagagtagtgcaatggagcaagccaaaaaggaaatggacgaaggattgaggcagttccagaataggcaagttgcgaacgccctctttgccgttcttagcgctgtagctcagattgggcttgcattccttacggctggtgcaacggctcctggagctgtggcgtcggcggggcaagctgtgagcatagcaggtcaggcggcgcaaggtctgcgaagggtggtggaaattctagagcagctggaggctgtgatggaggttgtggctgctgtgaaggacctcgtggattcattggaacaggtaggtcagattgtggacgcaccggtgatgccggaattgccctcagaggcggactggtccatttttgtgaacgaggtggaggccgtggcagagggcatgccaacggaagtctcggaggttccggtgtggagggccaagtgcaagaatgtggctgcactgggtcgggagatgagcatcacggcagtacagatgtcggagctgcagtatgacatctgggtgcaaggcatgatgcgggatatggctcgaagccaggcagacaggctggccgcaattcaacccgcggaccttaccaactatttggagatggctacccagatggatatgcggactacgaggatgctgctggggctcctcaacatattgcgcatccagaatgcggcgctcaggtacgagtatcttctaatgcccacggagctcacaacatggccactgggtatggataccgtgggtgacttgctcatcgcgcaggagaatgctgcactgataggattaatgcagctagggccctcatctgatttcacgagcaggcatgtggtgaaagacatacctgtgaacttgctgctcgatggcgaggattgggagtttgagattcctgtgcaagctggcatgtccagcttcccttccagctggtctcgcgtccgtattcggcacctggagatgcactttgtgaaggaggccagcggtattggtggtgagattatccaccagcctaccacccagactgggaccgtttacatccttctgcagggttccactatcttccatgaccgcagaagagaccaggtgttgccttttcaggccgctgctccgctcaactaccattacgcgtaccgcctcgacaccggcgactccactctcacaaacgaaccctctgaacagtttgccaacaagttcatgcagatgacacccttcacccgttggaggcttcgtctgtctgcgtccgcaaaagagaatgcaggattagcctttcccacggctacagcacttgactccactacccagattgtcatcactttccatgttacggccatcagacaaattgactggcggcacgacgaagag

SEQ ID NO: 207 - DNA, 2601 bp, Artificial Sequence
  Synthetic
atggctctcgtggattacggcaagcttttcgaggatctgaaccagataagcatgggtgtactggatcgggtagagttttcagaggtgatggtgatccacaggatgtatgtgaggctagctgatctgaatgtggggcagctcgagggagccgagaaagtgaagcgcttgtatgttttttccgacattgtcgagctaccagtcgtggaatggcggtggccgccgcaaataccaggatcggtgacggtgatcatattgtgtcgtcttcttcaatggccaactgatgggaggcagtcggacaccgagctccacctgacattcatgaagttgcatgccatacaacgagaggaaaatcggtgggagataaccgcagcagatggcatgaactggggagtttacatacacgcagaggaagtacaggttggcgtgctgacaatgtcatggtcttcggtacttagagtttcggcacttcgctctgttataacctccggctttcgcgccgttagtgtgtttgaggtaccgggaagtgtaaggtccacccttggagctactttaaggcccgatcacgccttatatagtacaactatgcaagccacacccaacgcatcgcatattagtgcttttaaccttcgcatagtttccccgtcggcatatcgtgtttgtcctctccaaaatgacacagatacctacttaggtattccagcagacgtggcggcagttcttccagtagacgtggtgactgatcctaacatcttgctgggcatgcagacaacggtacacattgcggagctagtcaaggcatgtcatccgtcacccgatgttgtgagcgctgtaggggagcacctgaactggctcaacaaactcttactcccacttaaggaatcgactcagttgcaaggaagcgagtcgtacaaggagtgccttgcactcttgggtcgtgttcacgctgcgatgaagatggtgagaattggcttagtagtgccccagctgcaatacagaatgtacggtagcctcatcaaccaaatggcccaagtagcacaaaactacgaccgagaattcaagcaattcaaattattcatcatccaaaatcaaatccttggcagctatttgctgcagcagaacagggcatttgctgagagggagctgcagatggagagctttcatgctgctgtcatttctcaaagaagggaggagttggacaatacattcgcaaagatggaccgattgagcgggcaaatggaggcagagagtagtgcaatggagcaagccaaaaaggaaatggacgaaggattgaggcagttccagaataggcaagttgcgaacgccctctttgccgttcttagcgctgtagctcagattgggcttgcattccttacggctggtgcaacggctcctggagctgtggcgtcggcggggcaagctgtgagcatagcaggtcaggcggcgcaaggtctgcgaagggtggtggaaattctagagcagctggaggctgtgatggaggttgtggctgctgtgaaggacctcgtggattcattggaacaggtaggtcagattgtggacgcaccggtgatgccggaattgccctcagaggcggactggtccatttttgtgaacgaggtggaggccgtggcagagggcatgccaacggaagtctcggaggttccggtgtggagggccaagtgcaagaatgtggctgcactgggtcgggagatgagcatcacggcagtacagatgtcggagctgcagtatgacatctgggtgcaaggcatgatgcgggatatggctcgaagccaggcagacaggctggccgcaattcaacccgcggaccttaccaactatttggagatggctacccagatggatatgcggactacgaggatgctgctggggctcctcaacatattgcgcatccagaatgcggcgctcaggtacgagtatcttctaatgcccacggagctcacaacatggccactgggtatggataccgtgggtgacttgctcatcgcgcaggagaatgctgcactgataggattaatgcagctagggccctcatctgatttcacgagcaggcatgtggtgaaagacatacctgtgaacttgctgctcgatggcgaggattgggagtttgagattcctgtgcaagctggcatgtccagcttcccttccagctggtctcgcgtccgtattcggcacctggagatgcactttgtgaaggaggccagcggtattggtggtgagattatccaccagcctaccacccagactgggaccgtttacatccttctgcagggttccactatcttccatgaccgcagaagagaccaggtgttgccttttcaggccgctgctccgctcaactaccattacgcgtaccgcctcgacaccggcgactccactctcacaaacgaaccctctgaacagtttgccaacaagttcatgcagatgacacccttcacccgttggaggcttcgtctgtctgcgtccgcaaaagagaatgcaggattagcctttcccacggctacagcacttgactccactacccagattgtcatcactttccatgttacggccatcagacaaattgactggcggcacgacgaagag

SEQ ID NO: 208 - DNA, 2601 bp, Artificial Sequence
  Synthetic
atggctctcgtggattacggcaagcttttcgaggatctgaaccagataagcatgggtgtactggatcgggtagagttttcagaggtgatggtgatccacaggatgtatgtgaggctagctgatctgaatgtggggcagctcgagggagccgagaaagtgaagcgcttgtatgttttttccgacgttatcgagctaccagtcgtggaatggcggtggccgccgcaaataccaggatcggtgacggtgatcatattgtgtcgtcttcttcaatggccaactgatgggaggcagtcggacaccgagctccacctgacattcatgaagttgcatgccatacaacgagaggaaaatcggtgggagataaccgcagcagatggcatgaactggggagtttacatacacgcagaggaagtacaggttggcgtgctgacaatgtcatggtcttcggtacttagagtttcggcacttcgctctgttataacctccggctttcgcgccgttagtgtgtttgaggtaccgggaagtgtaaggtccacccttggagctactttaaggcccgatcacgccttatatagtacaactatgcaagccacacccaacgcatcgcatattagtgcttttaaccttcgcatagtttccccgtcggcatatcgtgtttgtcctctccaaaatgacacagatacctacttaggtattccagcagacgtggcggcagttcttccagtagacgtggtgactgatcctaacatcttgctgggcatgcagacaacggtacacattgcggagctagtcaaggcatgtcatccgtcacccgatgttgtgagcgctgtaggggagcacctgaactggctcaacaaactcttactcccacttaaggaatcgactcagttgcaaggaagcgagtcgtacaaggagtgccttgcactcttgggtcgtgttcacgctgcgatgaagatggtgagaattggcttagtagtgccccagctgcaatacagaatgtacggtagcctcatcaaccaaatggcccaagtagcacaaaactacgaccgagaattcaagcaattcaaattattcatcatccaaaatcaaatccttggcagctatttgctgcagcagaacagggcatttgctgagagggagctgcagatggagagctttcatgctgctgtcatttctcaaagaagggaggagttggacaatacattcgcaaagatggaccgattgagcgggcaaatggaggcagagagtagtgcaatggagcaagccaaaaaggaaatggacgaaggattgaggcagttccagaataggcaagttgcgaacgccctctttgccgttcttagcgctgtagctcagattgggcttgcattccttacggctggtgcaacggctcctggagctgtggcgtcggcggggcaagctgtgagcatagcaggtcaggcggcgcaaggtctgcgaagggtggtggaaattctagagcagctggaggctgtgatggaggttgtggctgctgtgaaggacctcgtggattcattggaacaggtaggtcagattgtggacgcaccggtgatgccggaattgccctcagaggcggactggtccatttttgtgaacgaggtggaggccgtggcagagggcatgccaacggaagtctcggaggttccggtgtggagggccaagtgcaagaatgtggctgcactgggtcgggagatgagcatcacggcagtacagatgtcggagctgcagtatgacatctgggtgcaaggcatgatgcgggatatggctcgaagccaggcagacaggctggccgcaattcaacccgcggaccttaccaactatttggagatggctacccagatggatatgcggactacgaggatgctgctggggctcctcaacatattgcgcatccagaatgcggcgctcaggtacgagtatcttctaatgcccacggagctcacaacatggccactgggtatggataccgtgggtgacttgctcatcgcgcaggagaatgctgcactgataggattaatgcagctagggccctcatctgatttcacgagcaggcatgtggtgaaagacatacctgtgaacttgctgctcgatggcgaggattgggagtttgagattcctgtgcaagctggcatgtccagcttcccttccagctggtctcgcgtccgtattcggcacctggagatgcactttgtgaaggaggccagcggtattggtggtgagattatccaccagcctaccacccagactgggaccgtttacatccttctgcagggttccactatcttccatgaccgcagaagagaccaggtgttgccttttcaggccgctgctccgctcaactaccattacgcgtaccgcctcgacaccggcgactccactctcacaaacgaaccctctgaacagtttgccaacaagttcatgcagatgacacccttcacccgttggaggcttcgtctgtctgcgtccgcaaaagagaatgcaggattagcctttcccacggctacagcacttgactccactacccagattgtcatcactttccatgttacggccatcagacaaattgactggcggcacgacgaagag

SEQ ID NO: 209 - DNA, 2601 bp, Artificial Sequence
  Synthetic
atggctctcgtggattacggcaagcttttcgaggatctgaaccagataagcatgggtgtactggatcgggtagagttttcagaggtgatggtgatccacaggatgtatgtgaggctagctgatctgaatgtggggcagctcgagggagccgagaaagtgaagcgcttgtatgtttttaccgacgttatcgtgctaccagtcgtggaatggcggtggccgccgcaaataccaggatcggtgacggtgatcatattgtgtcgtcttcttcaatggccaactgatgggaggcagtcggacaccgagctccacctgacattcatgaagttgcatgccatacaacgagaggaaaatcggtgggagataaccgcagcagatggcatgaactggggagtttacatacacgcagaggaagtacaggttggcgtgctgacaatgtcatggtcttcggtacttagagtttcggcacttcgctctgttataacctccggctttcgcgccgttagtgtgtttgaggtaccgggaagtgtaaggtccacccttggagctactttaaggcccgatcacgccttatatagtacaactatgcaagccacacccaacgcatcgcatattagtgcttttaaccttcgcatagtttccccgtcggcatatcgtgtttgtcctctccaaaatgacacagatacctacttaggtattccagcagacgtggcggcagttcttccagtagacgtggtgactgatcctaacatcttgctgggcatgcagacaacggtacacattgcggagctagtcaaggcatgtcatccgtcacccgatgttgtgagcgctgtaggggagcacctgaactggctcaacaaactcttactcccacttaaggaatcgactcagttgcaaggaagcgagtcgtacaaggagtgccttgcactcttgggtcgtgttcacgctgcgatgaagatggtgagaattggcttagtagtgccccagctgcaatacagaatgtacggtagcctcatcaaccaaatggcccaagtagcacaaaactacgaccgagaattcaagcaattcaaattattcatcatccaaaatcaaatccttggcagctatttgctgcagcagaacagggcatttgctgagagggagctgcagatggagagctttcatgctgctgtcatttctcaaagaagggaggagttggacaatacattcgcaaagatggaccgattgagcgggcaaatggaggcagagagtagtgcaatggagcaagccaaaaaggaaatggacgaaggattgaggcagttccagaataggcaagttgcgaacgccctctttgccgttcttagcgctgtagctcagattgggcttgcattccttacggctggtgcaacggctcctggagctgtggcgtcggcggggcaagctgtgagcatagcaggtcaggcggcgcaaggtctgcgaagggtggtggaaattctagagcagctggaggctgtgatggaggttgtggctgctgtgaaggacctcgtggattcattggaacaggtaggtcagattgtggacgcaccggtgatgccggaattgccctcagaggcggactggtccatttttgtgaacgaggtggaggccgtggcagagggcatgccaacggaagtctcggaggttccggtgtggagggccaagtgcaagaatgtggctgcactgggtcgggagatgagcatcacggcagtacagatgtcggagctgcagtatgacatctgggtgcaaggcatgatgcgggatatggctcgaagccaggcagacaggctggccgcaattcaacccgcggaccttaccaactatttggagatggctacccagatggatatgcggactacgaggatgctgctggggctcctcaacatattgcgcatccagaatgcggcgctcaggtacgagtatcttctaatgcccacggagctcacaacatggccactgggtatggataccgtgggtgacttgctcatcgcgcaggagaatgctgcactgataggattaatgcagctagggccctcatctgatttcacgagcaggcatgtggtgaaagacatacctgtgaacttgctgctcgatggcgaggattgggagtttgagattcctgtgcaagctggcatgtccagcttcccttccagctggtctcgcgtccgtattcggcacctggagatgcactttgtgaaggaggccagcggtattggtggtgagattatccaccagcctaccacccagactgggaccgtttacatccttctgcagggttccactatcttccatgaccgcagaagagaccaggtgttgccttttcaggccgctgctccgctcaactaccattacgcgtaccgcctcgacaccggcgactccactctcacaaacgaaccctctgaacagtttgccaacaagttcatgcagatgacacccttcacccgttggaggcttcgtctgtctgcgtccgcaaaagagaatgcaggattagcctttcccacggctacagcacttgactccactacccagattgtcatcactttccatgttacggccatcagacaaattgactggcggcacgacgaagag

SEQ ID NO: 210 - DNA, 2601 bp, Artificial Sequence
  Synthetic
atggctctcgtggattacggcaagcttttcgaggatctgaaccagataagcatgggtgtactggatcgggtagagttttcagaggtgatggtgatccacaggatgtatgtgaggctagctgatctgaatgtggggcagctcgagggagccgagaaagtgaagcgcttgtatgtttttaccgacgttgtcgtgctaccagtcgtggaatggcggtggccgccgcaaataccaggatcggtgacggtgatcatattgtgtcgtcttcttcaatggccaactgatgggaggcagtcggacaccgagctccacctgacattcatgaagttgcatgccatacaacgagaggaaaatcggtgggagataaccgcagcagatggcatgaactggggagtttacatacacgcagaggaagtacaggttggcgtgctgacaatgtcatggtcttcggtacttagagtttcggcacttcgctctgttataacctccggctttcgcgccgttagtgtgtttgaggtaccgggaagtgtaaggtccacccttggagctactttaaggcccgatcacgccttatatagtacaactatgcaagccacacccaacgcatcgcatattagtgcttttaaccttcgcatagtttccccgtcggcatatcgtgtttgtcctctccaaaatgacacagatacctacttaggtattccagcagacgtggcggcagttcttccagtagacgtggtgactgatcctaacatcttgctgggcatgcagacaacggtacacattgcggagctagtcaaggcatgtcatccgtcacccgatgttgtgagcgctgtaggggagcacctgaactggctcaacaaactcttactcccacttaaggaatcgactcagttgcaaggaagcgagtcgtacaaggagtgccttgcactcttgggtcgtgttcacgctgcgatgaagatggtgagaattggcttagtagtgccccagctgcaatacagaatgtacggtagcctcatcaaccaaatggcccaagtagcacaaaactacgaccgagaattcaagcaattcaaattattcatcatccaaaatcaaatccttggcagctatttgctgcagcagaacagggcatttgctgagagggagctgcagatggagagctttcatgctgctgtcatttctcaaagaagggaggagttggacaatacattcgcaaagatggaccgattgagcgggcaaatggaggcagagagtagtgcaatggagcaagccaaaaaggaaatggacgaaggattgaggcagttccagaataggcaagttgcgaacgccctctttgccgttcttagcgctgtagctcagattgggcttgcattccttacggctggtgcaacggctcctggagctgtggcgtcggcggggcaagctgtgagcatagcaggtcaggcggcgcaaggtctgcgaagggtggtggaaattctagagcagctggaggctgtgatggaggttgtggctgctgtgaaggacctcgtggattcattggaacaggtaggtcagattgtggacgcaccggtgatgccggaattgccctcagaggcggactggtccatttttgtgaacgaggtggaggccgtggcagagggcatgccaacggaagtctcggaggttccggtgtggagggccaagtgcaagaatgtggctgcactgggtcgggagatgagcatcacggcagtacagatgtcggagctgcagtatgacatctgggtgcaaggcatgatgcgggatatggctcgaagccaggcagacaggctggccgcaattcaacccgcggaccttaccaactatttggagatggctacccagatggatatgcggactacgaggatgctgctggggctcctcaacatattgcgcatccagaatgcggcgctcaggtacgagtatcttctaatgcccacggagctcacaacatggccactgggtatggataccgtgggtgacttgctcatcgcgcaggagaatgctgcactgataggattaatgcagctagggccctcatctgatttcacgagcaggcatgtggtgaaagacatacctgtgaacttgctgctcgatggcgaggattgggagtttgagattcctgtgcaagctggcatgtccagcttcccttccagctggtctcgcgtccgtattcggcacctggagatgcactttgtgaaggaggccagcggtattggtggtgagattatccaccagcctaccacccagactgggaccgtttacatccttctgcagggttccactatcttccatgaccgcagaagagaccaggtgttgccttttcaggccgctgctccgctcaactaccattacgcgtaccgcctcgacaccggcgactccactctcacaaacgaaccctctgaacagtttgccaacaagttcatgcagatgacacccttcacccgttggaggcttcgtctgtctgcgtccgcaaaagagaatgcaggattagcctttcccacggctacagcacttgactccactacccagattgtcatcactttccatgttacggccatcagacaaattgactggcggcacgacgaagag

SEQ ID NO: 211 - DNA, 2601 bp, Artificial Sequence
  Synthetic
atggctctcgtggattacggcaagcttttcgaggatctgaaccagataagcatgggtgtactggatcgggtagagttttcagaggtgatggtgatccacaggatgtatgtgaggctagctgatctgaatgtggggcagctcgagggagccgagaaagtgatgcacttgtatatttttgccgacgttatcgagctaccagtcgtggaatggcggtggccgccgcaaataccaggatcggtgacggtgatcatattgtgtcgtcttcttcaatggccaactgatgggaggcagtcggacaccgagctccacctgacattcatgaagttgcatgccatacaacgagaggaaaatcggtgggagataaccgcagcagatggcatgaactggggagtttacatacacgcagaggaagtacaggttggcgtgctgacaatgtcatggtcttcggtacttagagtttcggcacttcgctctgttataacctccggctttcgcgccgttagtgtgtttgaggtaccgggaagtgtaaggtccacccttggagctactttaaggcccgatcacgccttatatagtacaactatgcaagccacacccaacgcatcgcatattagtgcttttaaccttcgcatagtttccccgtcggcatatcgtgtttgtcctctccaaaatgacacagatacctacttaggtattccagcagacgtggcggcagttcttccagtagacgtggtgactgatcctaacatcttgctgggcatgcagacaacggtacacattgcggagctagtcaaggcatgtcatccgtcacccgatgttgtgagcgctgtaggggagcacctgaactggctcaacaaactcttactcccacttaaggaatcgactcagttgcaaggaagcgagtcgtacaaggagtgccttgcactcttgggtcgtgttcacgctgcgatgaagatggtgagaattggcttagtagtgccccagctgcaatacagaatgtacggtagcctcatcaaccaaatggcccaagtagcacaaaactacgaccgagaattcaagcaattcaaattattcatcatccaaaatcaaatccttggcagctatttgctgcagcagaacagggcatttgctgagagggagctgcagatggagagctttcatgctgctgtcatttctcaaagaagggaggagttggacaatacattcgcaaagatggaccgattgagcgggcaaatggaggcagagagtagtgcaatggagcaagccaaaaaggaaatggacgaaggattgaggcagttccagaataggcaagttgcgaacgccctctttgccgttcttagcgctgtagctcagattgggcttgcattccttacggctggtgcaacggctcctggagctgtggcgtcggcggggcaagctgtgagcatagcaggtcaggcggcgcaaggtctgcgaagggtggtggaaattctagagcagctggaggctgtgatggaggttgtggctgctgtgaaggacctcgtggattcattggaacaggtaggtcagattgtggacgcaccggtgatgccggaattgccctcagaggcggactggtccatttttgtgaacgaggtggaggccgtggcagagggcatgccaacggaagtctcggaggttccggtgtggagggccaagtgcaagaatgtggctgcactgggtcgggagatgagcatcacggcagtacagatgtcggagctgcagtatgacatctgggtgcaaggcatgatgcgggatatggctcgaagccaggcagacaggctggccgcaattcaacccgcggaccttaccaactatttggagatggctacccagatggatatgcggactacgaggatgctgctggggctcctcaacatattgcgcatccagaatgcggcgctcaggtacgagtatcttctaatgcccacggagctcacaacatggccactgggtatggataccgtgggtgacttgctcatcgcgcaggagaatgctgcactgataggattaatgcagctagggccctcatctgatttcacgagcaggcatgtggtgaaagacatacctgtgaacttgctgctcgatggcgaggattgggagtttgagattcctgtgcaagctggcatgtccagcttcccttccagctggtctcgcgtccgtattcggcacctggagatgcactttgtgaaggaggccagcggtattggtggtgagattatccaccagcctaccacccagactgggaccgtttacatccttctgcagggttccactatcttccatgaccgcagaagagaccaggtgttgccttttcaggccgctgctccgctcaactaccattacgcgtaccgcctcgacaccggcgactccactctcacaaacgaaccctctgaacagtttgccaacaagttcatgcagatgacacccttcacccgttggaggcttcgtctgtctgcgtccgcaaaagagaatgcaggattagcctttcccacggctacagcacttgactccactacccagattgtcatcactttccatgttacggccatcagacaaattgactggcggcacgacgaagag

SEQ ID NO: 212 - DNA, 2601 bp, Artificial Sequence
  Synthetic
atggctctcgtggattacggcaagcttttcgaggatctgaaccagataagcatgggtgtactggatcgggtagagttttcagaggtgatggtgatccacaggatgtatgtgaggctagctgatctgaatgtggggcagctcgagggagccgagaaagtgatgcagttgtatattttttgcgacattctcgagctaccagtcgtggaatggcggtggccgacgcaaataccaggatcggtgacggtgatcatattgtgtcgtcttcttcaatggccaactgatgggaggcagtcggacaccgagctccacctgacattcatgaagttgcatgccatacaacgagaggaaaatcggtgggagataaccgcagcagatggcatgaactggggagtttacatacacgcagaggaagtacaggttggcgtgctgacaatgtcatggtcttcggtacttagagtttcggcacttcgctctgttataacctccggctttcgcgccgttagtgtgtttgaggtaccgggaagtgtaaggtccacccttggagctactttaaggcccgatcacgccttatatagtacaactatgcaagccacacccaacgcatcgcatattagtgcttttaaccttcgcatagtttccccgtcggcatatcgtgtttgtcctctccaaaatgacacagatacctacttaggtattccagcagacgtggcggcagttcttccagtagacgtggtgactgatcctaacatcttgctgggcatgcagacaacggtacacattgcggagctagtcaaggcatgtcatccgtcacccgatgttgtgagcgctgtaggggagcacctgaactggctcaacaaactcttactcccacttaaggaatcgactcagttgcaaggaagcgagtcgtacaaggagtgccttgcactcttgggtcgtgttcacgctgcgatgaagatggtgagaattggcttagtagtgccccagctgcaatacagaatgtacggtagcctcatcaaccaaatggcccaagtagcacaaaactacgaccgagaattcaagcaattcaaattattcatcatccaaaatcaaatccttggcagctatttgctgcagcagaacagggcatttgctgagagggagctgcagatggagagctttcatgctgctgtcatttctcaaagaagggaggagttggacaatacattcgcaaagatggaccgattgagcgggcaaatggaggcagagagtagtgcaatggagcaagccaaaaaggaaatggacgaaggattgaggcagttccagaataggcaagttgcgaacgccctctttgccgttcttagcgctgtagctcagattgggcttgcattccttacggctggtgcaacggctcctggagctgtggcgtcggcggggcaagctgtgagcatagcaggtcaggcggcgcaaggtctgcgaagggtggtggaaattctagagcagctggaggctgtgatggaggttgtggctgctgtgaaggacctcgtggattcattggaacaggtaggtcagattgtggacgcaccggtgatgccggaattgccctcagaggcggactggtccatttttgtgaacgaggtggaggccgtggcagagggcatgccaacggaagtctcggaggttccggtgtggagggccaagtgcaagaatgtggctgcactgggtcgggagatgagcatcacggcagtacagatgtcggagctgcagtatgacatctgggtgcaaggcatgatgcgggatatggctcgaagccaggcagacaggctggccgcaattcaacccgcggaccttaccaactatttggagatggctacccagatggatatgcggactacgaggatgctgctggggctcctcaacatattgcgcatccagaatgcggcgctcaggtacgagtatcttctaatgcccacggagctcacaacatggccactgggtatggataccgtgggtgacttgctcatcgcgcaggagaatgctgcactgataggattaatgcagctagggccctcatctgatttcacgagcaggcatgtggtgaaagacatacctgtgaacttgctgctcgatggcgaggattgggagtttgagattcctgtgcaagctggcatgtccagcttcccttccagctggtctcgcgtccgtattcggcacctggagatgcactttgtgaaggaggccagcggtattggtggtgagattatccaccagcctaccacccagactgggaccgtttacatccttctgcagggttccactatcttccatgaccgcagaagagaccaggtgttgccttttcaggccgctgctccgctcaactaccattacgcgtaccgcctcgacaccggcgactccactctcacaaacgaaccctctgaacagtttgccaacaagttcatgcagatgacacccttcacccgttggaggcttcgtctgtctgcgtccgcaaaagagaatgcaggattagcctttcccacggctacagcacttgactccactacccagattgtcatcactttccatgttacggccatcagacaaattgactggcggcacgacgaagag

SEQ ID NO: 213 - DNA, 2601 bp, Artificial Sequence
  Synthetic
atggctctcgtggattacggcaagcttttcgaggatctgaaccagataagcatgggtgtactggatcgggtagagttttcagaggtgatggtgatccacaggatgtatgtgaggctagctgatctgaatgtggggcagctcgagggagccgagaaagtgatgcgcttgtatatttttgccgacgttgtcgtgctaccagtcgtggaatggcggtggccgccgcaaataccaggatcggtgacggtgatcatattgtgtcgtcttcttcaatggccaactgatgggaggcagtcggacaccgagctccacctgacattcatgaagttgcatgccatacaacgagaggaaaatcggtgggagataaccgcagcagatggcatgaactggggagtttacatacacgcagaggaagtacaggttggcgtgctgacaatgtcatggtcttcggtacttagagtttcggcacttcgctctgttataacctccggctttcgcgccgttagtgtgtttgaggtaccgggaagtgtaaggtccacccttggagctactttaaggcccgatcacgccttatatagtacaactatgcaagccacacccaacgcatcgcatattagtgcttttaaccttcgcatagtttccccgtcggcatatcgtgtttgtcctctccaaaatgacacagatacctacttaggtattccagcagacgtggcggcagttcttccagtagacgtggtgactgatcctaacatcttgctgggcatgcagacaacggtacacattgcggagctagtcaaggcatgtcatccgtcacccgatgttgtgagcgctgtaggggagcacctgaactggctcaacaaactcttactcccacttaaggaatcgactcagttgcaaggaagcgagtcgtacaaggagtgccttgcactcttgggtcgtgttcacgctgcgatgaagatggtgagaattggcttagtagtgccccagctgcaatacagaatgtacggtagcctcatcaaccaaatggcccaagtagcacaaaactacgaccgagaattcaagcaattcaaattattcatcatccaaaatcaaatccttggcagctatttgctgcagcagaacagggcatttgctgagagggagctgcagatggagagctttcatgctgctgtcatttctcaaagaagggaggagttggacaatacattcgcaaagatggaccgattgagcgggcaaatggaggcagagagtagtgcaatggagcaagccaaaaaggaaatggacgaaggattgaggcagttccagaataggcaagttgcgaacgccctctttgccgttcttagcgctgtagctcagattgggcttgcattccttacggctggtgcaacggctcctggagctgtggcgtcggcggggcaagctgtgagcatagcaggtcaggcggcgcaaggtctgcgaagggtggtggaaattctagagcagctggaggctgtgatggaggttgtggctgctgtgaaggacctcgtggattcattggaacaggtaggtcagattgtggacgcaccggtgatgccggaattgccctcagaggcggactggtccatttttgtgaacgaggtggaggccgtggcagagggcatgccaacggaagtctcggaggttccggtgtggagggccaagtgcaagaatgtggctgcactgggtcgggagatgagcatcacggcagtacagatgtcggagctgcagtatgacatctgggtgcaaggcatgatgcgggatatggctcgaagccaggcagacaggctggccgcaattcaacccgcggaccttaccaactatttggagatggctacccagatggatatgcggactacgaggatgctgctggggctcctcaacatattgcgcatccagaatgcggcgctcaggtacgagtatcttctaatgcccacggagctcacaacatggccactgggtatggataccgtgggtgacttgctcatcgcgcaggagaatgctgcactgataggattaatgcagctagggccctcatctgatttcacgagcaggcatgtggtgaaagacatacctgtgaacttgctgctcgatggcgaggattgggagtttgagattcctgtgcaagctggcatgtccagcttcccttccagctggtctcgcgtccgtattcggcacctggagatgcactttgtgaaggaggccagcggtattggtggtgagattatccaccagcctaccacccagactgggaccgtttacatccttctgcagggttccactatcttccatgaccgcagaagagaccaggtgttgccttttcaggccgctgctccgctcaactaccattacgcgtaccgcctcgacaccggcgactccactctcacaaacgaaccctctgaacagtttgccaacaagttcatgcagatgacacccttcacccgttggaggcttcgtctgtctgcgtccgcaaaagagaatgcaggattagcctttcccacggctacagcacttgactccactacccagattgtcatcactttccatgttacggccatcagacaaattgactggcggcacgacgaagag

SEQ ID NO: 214 - DNA, 2601 bp, Artificial Sequence
  Synthetic
atggctctcgtggattacggcaagcttttcgaggatctgaaccagataagcatgggtgtactggatcgggtagagttttcagaggtgatggtgatccacaggatgtatgtgaggctagctgatctgaatgtggggcagctcgagggagccgagaaagtgatgcgcttgtatattttttgcgacgttatcgagctaccagtcgtggaatggcggtggccgccgcaaataccaggatcggtgacggtgatcatattgtgtcgtcttcttcaatggccaactgatgggaggcagtcggacaccgagctccacctgacattcatgaagttgcatgccatacaacgagaggaaaatcggtgggagataaccgcagcagatggcatgaactggggagtttacatacacgcagaggaagtacaggttggcgtgctgacaatgtcatggtcttcggtacttagagtttcggcacttcgctctgttataacctccggctttcgcgccgttagtgtgtttgaggtaccgggaagtgtaaggtccacccttggagctactttaaggcccgatcacgccttatatagtacaactatgcaagccacacccaacgcatcgcatattagtgcttttaaccttcgcatagtttccccgtcggcatatcgtgtttgtcctctccaaaatgacacagatacctacttaggtattccagcagacgtggcggcagttcttccagtagacgtggtgactgatcctaacatcttgctgggcatgcagacaacggtacacattgcggagctagtcaaggcatgtcatccgtcacccgatgttgtgagcgctgtaggggagcacctgaactggctcaacaaactcttactcccacttaaggaatcgactcagttgcaaggaagcgagtcgtacaaggagtgccttgcactcttgggtcgtgttcacgctgcgatgaagatggtgagaattggcttagtagtgccccagctgcaatacagaatgtacggtagcctcatcaaccaaatggcccaagtagcacaaaactacgaccgagaattcaagcaattcaaattattcatcatccaaaatcaaatccttggcagctatttgctgcagcagaacagggcatttgctgagagggagctgcagatggagagctttcatgctgctgtcatttctcaaagaagggaggagttggacaatacattcgcaaagatggaccgattgagcgggcaaatggaggcagagagtagtgcaatggagcaagccaaaaaggaaatggacgaaggattgaggcagttccagaataggcaagttgcgaacgccctctttgccgttcttagcgctgtagctcagattgggcttgcattccttacggctggtgcaacggctcctggagctgtggcgtcggcggggcaagctgtgagcatagcaggtcaggcggcgcaaggtctgcgaagggtggtggaaattctagagcagctggaggctgtgatggaggttgtggctgctgtgaaggacctcgtggattcattggaacaggtaggtcagattgtggacgcaccggtgatgccggaattgccctcagaggcggactggtccatttttgtgaacgaggtggaggccgtggcagagggcatgccaacggaagtctcggaggttccggtgtggagggccaagtgcaagaatgtggctgcactgggtcgggagatgagcatcacggcagtacagatgtcggagctgcagtatgacatctgggtgcaaggcatgatgcgggatatggctcgaagccaggcagacaggctggccgcaattcaacccgcggaccttaccaactatttggagatggctacccagatggatatgcggactacgaggatgctgctggggctcctcaacatattgcgcatccagaatgcggcgctcaggtacgagtatcttctaatgcccacggagctcacaacatggccactgggtatggataccgtgggtgacttgctcatcgcgcaggagaatgctgcactgataggattaatgcagctagggccctcatctgatttcacgagcaggcatgtggtgaaagacatacctgtgaacttgctgctcgatggcgaggattgggagtttgagattcctgtgcaagctggcatgtccagcttcccttccagctggtctcgcgtccgtattcggcacctggagatgcactttgtgaaggaggccagcggtattggtggtgagattatccaccagcctaccacccagactgggaccgtttacatccttctgcagggttccactatcttccatgaccgcagaagagaccaggtgttgccttttcaggccgctgctccgctcaactaccattacgcgtaccgcctcgacaccggcgactccactctcacaaacgaaccctctgaacagtttgccaacaagttcatgcagatgacacccttcacccgttggaggcttcgtctgtctgcgtccgcaaaagagaatgcaggattagcctttcccacggctacagcacttgactccactacccagattgtcatcactttccatgttacggccatcagacaaattgactggcggcacgacgaagag

SEQ ID NO: 215 - DNA, 2601 bp, Artificial Sequence
  Synthetic
atggctctcgtggattacggcaagcttttcgaggatctgaaccagataagcatgggtgtactggatcgggtagagttttcagaggtgatggtgatccacaggatgtatgtgaggctagctgatctgaatgtggggcagctcgagggagccgagaaagtgatgcgcttgtatgttttttgcgacattatcgagctaccagtcgtggaatggcggtggccgccgcaaataccaggatcggtgacggtgatcatattgtgtcgtcttcttcaatggccaactgatgggaggcagtcggacaccgagctccacctgacattcatgaagttgcatgccatacaacgagaggaaaatcggtgggagataaccgcagcagatggcatgaactggggagtttacatacacgcagaggaagtacaggttggcgtgctgacaatgtcatggtcttcggtacttagagtttcggcacttcgctctgttataacctccggctttcgcgccgttagtgtgtttgaggtaccgggaagtgtaaggtccacccttggagctactttaaggcccgatcacgccttatatagtacaactatgcaagccacacccaacgcatcgcatattagtgcttttaaccttcgcatagtttccccgtcggcatatcgtgtttgtcctctccaaaatgacacagatacctacttaggtattccagcagacgtggcggcagttcttccagtagacgtggtgactgatcctaacatcttgctgggcatgcagacaacggtacacattgcggagctagtcaaggcatgtcatccgtcacccgatgttgtgagcgctgtaggggagcacctgaactggctcaacaaactcttactcccacttaaggaatcgactcagttgcaaggaagcgagtcgtacaaggagtgccttgcactcttgggtcgtgttcacgctgcgatgaagatggtgagaattggcttagtagtgccccagctgcaatacagaatgtacggtagcctcatcaaccaaatggcccaagtagcacaaaactacgaccgagaattcaagcaattcaaattattcatcatccaaaatcaaatccttggcagctatttgctgcagcagaacagggcatttgctgagagggagctgcagatggagagctttcatgctgctgtcatttctcaaagaagggaggagttggacaatacattcgcaaagatggaccgattgagcgggcaaatggaggcagagagtagtgcaatggagcaagccaaaaaggaaatggacgaaggattgaggcagttccagaataggcaagttgcgaacgccctctttgccgttcttagcgctgtagctcagattgggcttgcattccttacggctggtgcaacggctcctggagctgtggcgtcggcggggcaagctgtgagcatagcaggtcaggcggcgcaaggtctgcgaagggtggtggaaattctagagcagctggaggctgtgatggaggttgtggctgctgtgaaggacctcgtggattcattggaacaggtaggtcagattgtggacgcaccggtgatgccggaattgccctcagaggcggactggtccatttttgtgaacgaggtggaggccgtggcagagggcatgccaacggaagtctcggaggttccggtgtggagggccaagtgcaagaatgtggctgcactgggtcgggagatgagcatcacggcagtacagatgtcggagctgcagtatgacatctgggtgcaaggcatgatgcgggatatggctcgaagccaggcagacaggctggccgcaattcaacccgcggaccttaccaactatttggagatggctacccagatggatatgcggactacgaggatgctgctggggctcctcaacatattgcgcatccagaatgcggcgctcaggtacgagtatcttctaatgcccacggagctcacaacatggccactgggtatggataccgtgggtgacttgctcatcgcgcaggagaatgctgcactgataggattaatgcagctagggccctcatctgatttcacgagcaggcatgtggtgaaagacatacctgtgaacttgctgctcgatggcgaggattgggagtttgagattcctgtgcaagctggcatgtccagcttcccttccagctggtctcgcgtccgtattcggcacctggagatgcactttgtgaaggaggccagcggtattggtggtgagattatccaccagcctaccacccagactgggaccgtttacatccttctgcagggttccactatcttccatgaccgcagaagagaccaggtgttgccttttcaggccgctgctccgctcaactaccattacgcgtaccgcctcgacaccggcgactccactctcacaaacgaaccctctgaacagtttgccaacaagttcatgcagatgacacccttcacccgttggaggcttcgtctgtctgcgtccgcaaaagagaatgcaggattagcctttcccacggctacagcacttgactccactacccagattgtcatcactttccatgttacggccatcagacaaattgactggcggcacgacgaagag

SEQ ID NO: 216 - DNA, 2601 bp, Artificial Sequence
  Synthetic
atggctctcgtggattacggcaagcttttcgaggatctgaaccagataagcatgggtgtactggatcgggtagagttttcagaggtgatggtgatccacaggatgtatgtgaggctagctgatctgaatgtggggcagctcgagggagccgagaaagtgatgcggttgtatgttttttgcgacattctcgtgctaccagtcgtggaatggcggtggccgccgcaaataccaggatcggtgacggtgatcatattgtgtcgtcttcttcaatggccaactgatgggaggcagtcggacaccgagctccacctgacattcatgaagttgcatgccatacaacgagaggaaaatcggtgggagataaccgcagcagatggcatgaactggggagtttacatacacgcagaggaagtacaggttggcgtgctgacaatgtcatggtcttcggtacttagagtttcggcacttcgctctgttataacctccggctttcgcgccgttagtgtgtttgaggtaccgggaagtgtaaggtccacccttggagctactttaaggcccgatcacgccttatatagtacaactatgcaagccacacccaacgcatcgcatattagtgcttttaaccttcgcatagtttccccgtcggcatatcgtgtttgtcctctccaaaatgacacagatacctacttaggtattccagcagacgtggcggcagttcttccagtagacgtggtgactgatcctaacatcttgctgggcatgcagacaacggtacacattgcggagctagtcaaggcatgtcatccgtcacccgatgttgtgagcgctgtaggggagcacctgaactggctcaacaaactcttactcccacttaaggaatcgactcagttgcaaggaagcgagtcgtacaaggagtgccttgcactcttgggtcgtgttcacgctgcgatgaagatggtgagaattggcttagtagtgccccagctgcaatacagaatgtacggtagcctcatcaaccaaatggcccaagtagcacaaaactacgaccgagaattcaagcaattcaaattattcatcatccaaaatcaaatccttggcagctatttgctgcagcagaacagggcatttgctgagagggagctgcagatggagagctttcatgctgctgtcatttctcaaagaagggaggagttggacaatacattcgcaaagatggaccgattgagcgggcaaatggaggcagagagtagtgcaatggagcaagccaaaaaggaaatggacgaaggattgaggcagttccagaataggcaagttgcgaacgccctctttgccgttcttagcgctgtagctcagattgggcttgcattccttacggctggtgcaacggctcctggagctgtggcgtcggcggggcaagctgtgagcatagcaggtcaggcggcgcaaggtctgcgaagggtggtggaaattctagagcagctggaggctgtgatggaggttgtggctgctgtgaaggacctcgtggattcattggaacaggtaggtcagattgtggacgcaccggtgatgccggaattgccctcagaggcggactggtccatttttgtgaacgaggtggaggccgtggcagagggcatgccaacggaagtctcggaggttccggtgtggagggccaagtgcaagaatgtggctgcactgggtcgggagatgagcatcacggcagtacagatgtcggagctgcagtatgacatctgggtgcaaggcatgatgcgggatatggctcgaagccaggcagacaggctggccgcaattcaacccgcggaccttaccaactatttggagatggctacccagatggatatgcggactacgaggatgctgctggggctcctcaacatattgcgcatccagaatgcggcgctcaggtacgagtatcttctaatgcccacggagctcacaacatggccactgggtatggataccgtgggtgacttgctcatcgcgcaggagaatgctgcactgataggattaatgcagctagggccctcatctgatttcacgagcaggcatgtggtgaaagacatacctgtgaacttgctgctcgatggcgaggattgggagtttgagattcctgtgcaagctggcatgtccagcttcccttccagctggtctcgcgtccgtattcggcacctggagatgcactttgtgaaggaggccagcggtattggtggtgagattatccaccagcctaccacccagactgggaccgtttacatccttctgcagggttccactatcttccatgaccgcagaagagaccaggtgttgccttttcaggccgctgctccgctcaactaccattacgcgtaccgcctcgacaccggcgactccactctcacaaacgaaccctctgaacagtttgccaacaagttcatgcagatgacacccttcacccgttggaggcttcgtctgtctgcgtccgcaaaagagaatgcaggattagcctttcccacggctacagcacttgactccactacccagattgtcatcactttccatgttacggccatcagacaaattgactggcggcacgacgaagag

SEQ ID NO: 217 - DNA, 2601 bp, Artificial Sequence
  Synthetic
atggctctcgtggattacggcaagcttttcgaggatctgaaccagataagcatgggtgtactggatcgggtagagttttcagaggtgatggtgatccacaggatgtatgtgaggctagctgatctgaatgtggggcagctcgagggagccgagaaagtgatgcggttgtatgtttttagcgacattatcgtgctaccagtcgtggaatggcggtggccgccgcaaataccaggatcggtgacggtgatcatattgtgtcgtcttcttcaatggccaactgatgggaggcagtcggacaccgagctccacctgacattcatgaagttgcatgccatacaacgagaggaaaatcggtgggagataaccgcagcagatggcatgaactggggagtttacatacacgcagaggaagtacaggttggcgtgctgacaatgtcatggtcttcggtacttagagtttcggcacttcgctctgttataacctccggctttcgcgccgttagtgtgtttgaggtaccgggaagtgtaaggtccacccttggagctactttaaggcccgatcacgccttatatagtacaactatgcaagccacacccaacgcatcgcatattagtgcttttaaccttcgcatagtttccccgtcggcatatcgtgtttgtcctctccaaaatgacacagatacctacttaggtattccagcagacgtggcggcagttcttccagtagacgtggtgactgatcctaacatcttgctgggcatgcagacaacggtacacattgcggagctagtcaaggcatgtcatccgtcacccgatgttgtgagcgctgtaggggagcacctgaactggctcaacaaactcttactcccacttaaggaatcgactcagttgcaaggaagcgagtcgtacaaggagtgccttgcactcttgggtcgtgttcacgctgcgatgaagatggtgagaattggcttagtagtgccccagctgcaatacagaatgtacggtagcctcatcaaccaaatggcccaagtagcacaaaactacgaccgagaattcaagcaattcaaattattcatcatccaaaatcaaatccttggcagctatttgctgcagcagaacagggcatttgctgagagggagctgcagatggagagctttcatgctgctgtcatttctcaaagaagggaggagttggacaatacattcgcaaagatggaccgattgagcgggcaaatggaggcagagagtagtgcaatggagcaagccaaaaaggaaatggacgaaggattgaggcagttccagaataggcaagttgcgaacgccctctttgccgttcttagcgctgtagctcagattgggcttgcattccttacggctggtgcaacggctcctggagctgtggcgtcggcggggcaagctgtgagcatagcaggtcaggcggcgcaaggtctgcgaagggtggtggaaattctagagcagctggaggctgtgatggaggttgtggctgctgtgaaggacctcgtggattcattggaacaggtaggtcagattgtggacgcaccggtgatgccggaattgccctcagaggcggactggtccatttttgtgaacgaggtggaggccgtggcagagggcatgccaacggaagtctcggaggttccggtgtggagggccaagtgcaagaatgtggctgcactgggtcgggagatgagcatcacggcagtacagatgtcggagctgcagtatgacatctgggtgcaaggcatgatgcgggatatggctcgaagccaggcagacaggctggccgcaattcaacccgcggaccttaccaactatttggagatggctacccagatggatatgcggactacgaggatgctgctggggctcctcaacatattgcgcatccagaatgcggcgctcaggtacgagtatcttctaatgcccacggagctcacaacatggccactgggtatggataccgtgggtgacttgctcatcgcgcaggagaatgctgcactgataggattaatgcagctagggccctcatctgatttcacgagcaggcatgtggtgaaagacatacctgtgaacttgctgctcgatggcgaggattgggagtttgagattcctgtgcaagctggcatgtccagcttcccttccagctggtctcgcgtccgtattcggcacctggagatgcactttgtgaaggaggccagcggtattggtggtgagattatccaccagcctaccacccagactgggaccgtttacatccttctgcagggttccactatcttccatgaccgcagaagagaccaggtgttgccttttcaggccgctgctccgctcaactaccattacgcgtaccgcctcgacaccggcgactccactctcacaaacgaaccctctgaacagtttgccaacaagttcatgcagatgacacccttcacccgttggaggcttcgtctgtctgcgtccgcaaaagagaatgcaggattagcctttcccacggctacagcacttgactccactacccagattgtcatcactttccatgttacggccatcagacaaattgactggcggcacgacgaagag

SEQ ID NO: 218 - DNA, 2601 bp, Artificial Sequence
  Synthetic
atggctctcgtggattacggcaagcttttcgaggatctgaaccagataagcatgggtgtactggatcgggtagagttttcagaggtgatggtgatccacaggatgtatgtgaggctagctgatctgaatgtggggcagctcgagggagccgagaaagtgaggcacttgtatatttttgccgacattatcgagctaccagtcgtggaatggcggtggccgccgcaaataccaggatcggtgacggtgatcatattgtgtcgtcttcttcaatggccaactgatgggaggcagtcggacaccgagctccacctgacattcatgaagttgcatgccatacaacgagaggaaaatcggtgggagataaccgcagcagatggcatgaactggggagtttacatacacgcagaggaagtacaggttggcgtgctgacaatgtcatggtcttcggtacttagagtttcggcacttcgctctgttataacctccggctttcgcgccgttagtgtgtttgaggtaccgggaagtgtaaggtccacccttggagctactttaaggcccgatcacgccttatatagtacaactatgcaagccacacccaacgcatcgcatattagtgcttttaaccttcgcatagtttccccgtcggcatatcgtgtttgtcctctccaaaatgacacagatacctacttaggtattccagcagacgtggcggcagttcttccagtagacgtggtgactgatcctaacatcttgctgggcatgcagacaacggtacacattgcggagctagtcaaggcatgtcatccgtcacccgatgttgtgagcgctgtaggggagcacctgaactggctcaacaaactcttactcccacttaaggaatcgactcagttgcaaggaagcgagtcgtacaaggagtgccttgcactcttgggtcgtgttcacgctgcgatgaagatggtgagaattggcttagtagtgccccagctgcaatacagaatgtacggtagcctcatcaaccaaatggcccaagtagcacaaaactacgaccgagaattcaagcaattcaaattattcatcatccaaaatcaaatccttggcagctatttgctgcagcagaacagggcatttgctgagagggagctgcagatggagagctttcatgctgctgtcatttctcaaagaagggaggagttggacaatacattcgcaaagatggaccgattgagcgggcaaatggaggcagagagtagtgcaatggagcaagccaaaaaggaaatggacgaaggattgaggcagttccagaataggcaagttgcgaacgccctctttgccgttcttagcgctgtagctcagattgggcttgcattccttacggctggtgcaacggctcctggagctgtggcgtcggcggggcaagctgtgagcatagcaggtcaggcggcgcaaggtctgcgaagggtggtggaaattctagagcagctggaggctgtgatggaggttgtggctgctgtgaaggacctcgtggattcattggaacaggtaggtcagattgtggacgcaccggtgatgccggaattgccctcagaggcggactggtccatttttgtgaacgaggtggaggccgtggcagagggcatgccaacggaagtctcggaggttccggtgtggagggccaagtgcaagaatgtggctgcactgggtcgggagatgagcatcacggcagtacagatgtcggagctgcagtatgacatctgggtgcaaggcatgatgcgggatatggctcgaagccaggcagacaggctggccgcaattcaacccgcggaccttaccaactatttggagatggctacccagatggatatgcggactacgaggatgctgctggggctcctcaacatattgcgcatccagaatgcggcgctcaggtacgagtatcttctaatgcccacggagctcacaacatggccactgggtatggataccgtgggtgacttgctcatcgcgcaggagaatgctgcactgataggattaatgcagctagggccctcatctgatttcacgagcaggcatgtggtgaaagacatacctgtgaacttgctgctcgatggcgaggattgggagtttgagattcctgtgcaagctggcatgtccagcttcccttccagctggtctcgcgtccgtattcggcacctggagatgcactttgtgaaggaggccagcggtattggtggtgagattatccaccagcctaccacccagactgggaccgtttacatccttctgcagggttccactatcttccatgaccgcagaagagaccaggtgttgccttttcaggccgctgctccgctcaactaccattacgcgtaccgcctcgacaccggcgactccactctcacaaacgaaccctctgaacagtttgccaacaagttcatgcagatgacacccttcacccgttggaggcttcgtctgtctgcgtccgcaaaagagaatgcaggattagcctttcccacggctacagcacttgactccactacccagattgtcatcactttccatgttacggccatcagacaaattgactggcggcacgacgaagag

SEQ ID NO: 219 - DNA, 2601 bp, Artificial Sequence
  Synthetic
atggctctcgtggattacggcaagcttttcgaggatctgaaccagataagcatgggtgtactggatcgggtagagttttcagaggtgatggtgatccacaggatgtatgtgaggctagctgatctgaatgtggggcagctcgagggagccgagaaagtgaggcacttgtatatttttgccgacgttgtcgagctaccagtcgtggaatggcggtggccgccgcaaataccaggatcggtgacggtgatcatattgtgtcgtcttcttcaatggccaactgatgggaggcagtcggacaccgagctccacctgacattcatgaagttgcatgccatacaacgagaggaaaatcggtgggagataaccgcagcagatggcatgaactggggagtttacatacacgcagaggaagtacaggttggcgtgctgacaatgtcatggtcttcggtacttagagtttcggcacttcgctctgttataacctccggctttcgcgccgttagtgtgtttgaggtaccgggaagtgtaaggtccacccttggagctactttaaggcccgatcacgccttatatagtacaactatgcaagccacacccaacgcatcgcatattagtgcttttaaccttcgcatagtttccccgtcggcatatcgtgtttgtcctctccaaaatgacacagatacctacttaggtattccagcagacgtggcggcagttcttccagtagacgtggtgactgatcctaacatcttgctgggcatgcagacaacggtacacattgcggagctagtcaaggcatgtcatccgtcacccgatgttgtgagcgctgtaggggagcacctgaactggctcaacaaactcttactcccacttaaggaatcgactcagttgcaaggaagcgagtcgtacaaggagtgccttgcactcttgggtcgtgttcacgctgcgatgaagatggtgagaattggcttagtagtgccccagctgcaatacagaatgtacggtagcctcatcaaccaaatggcccaagtagcacaaaactacgaccgagaattcaagcaattcaaattattcatcatccaaaatcaaatccttggcagctatttgctgcagcagaacagggcatttgctgagagggagctgcagatggagagctttcatgctgctgtcatttctcaaagaagggaggagttggacaatacattcgcaaagatggaccgattgagcgggcaaatggaggcagagagtagtgcaatggagcaagccaaaaaggaaatggacgaaggattgaggcagttccagaataggcaagttgcgaacgccctctttgccgttcttagcgctgtagctcagattgggcttgcattccttacggctggtgcaacggctcctggagctgtggcgtcggcggggcaagctgtgagcatagcaggtcaggcggcgcaaggtctgcgaagggtggtggaaattctagagcagctggaggctgtgatggaggttgtggctgctgtgaaggacctcgtggattcattggaacaggtaggtcagattgtggacgcaccggtgatgccggaattgccctcagaggcggactggtccatttttgtgaacgaggtggaggccgtggcagagggcatgccaacggaagtctcggaggttccggtgtggagggccaagtgcaagaatgtggctgcactgggtcgggagatgagcatcacggcagtacagatgtcggagctgcagtatgacatctgggtgcaaggcatgatgcgggatatggctcgaagccaggcagacaggctggccgcaattcaacccgcggaccttaccaactatttggagatggctacccagatggatatgcggactacgaggatgctgctggggctcctcaacatattgcgcatccagaatgcggcgctcaggtacgagtatcttctaatgcccacggagctcacaacatggccactgggtatggataccgtgggtgacttgctcatcgcgcaggagaatgctgcactgataggattaatgcagctagggccctcatctgatttcacgagcaggcatgtggtgaaagacatacctgtgaacttgctgctcgatggcgaggattgggagtttgagattcctgtgcaagctggcatgtccagcttcccttccagctggtctcgcgtccgtattcggcacctggagatgcactttgtgaaggaggccagcggtattggtggtgagattatccaccagcctaccacccagactgggaccgtttacatccttctgcagggttccactatcttccatgaccgcagaagagaccaggtgttgccttttcaggccgctgctccgctcaactaccattacgcgtaccgcctcgacaccggcgactccactctcacaaacgaaccctctgaacagtttgccaacaagttcatgcagatgacacccttcacccgttggaggcttcgtctgtctgcgtccgcaaaagagaatgcaggattagcctttcccacggctacagcacttgactccactacccagattgtcatcactttccatgttacggccatcagacaaattgactggcggcacgacgaagag

SEQ ID NO: 220 - DNA, 2601 bp, Artificial Sequence
  Synthetic
atggctctcgtggattacggcaagcttttcgaggatctgaaccagataagcatgggtgtactggatcgggtagagttttcagaggtgatggtgatccacaggatgtatgtgaggctagctgatctgaatgtggggcagctcgagggagccgagaaagtgaggcacttgtatattttttgcgacgttatcgagctaccagtcgtggaatggcggtggccgccgcaaataccaggatcggtgacggtgatcatattgtgtcgtcttcttcaatggccaactgatgggaggcagtcggacaccgagctccacctgacattcatgaagttgcatgccatacaacgagaggaaaatcggtgggagataaccgcagcagatggcatgaactggggagtttacatacacgcagaggaagtacaggttggcgtgctgacaatgtcatggtcttcggtacttagagtttcggcacttcgctctgttataacctccggctttcgcgccgttagtgtgtttgaggtaccgggaagtgtaaggtccacccttggagctactttaaggcccgatcacgccttatatagtacaactatgcaagccacacccaacgcatcgcatattagtgcttttaaccttcgcatagtttccccgtcggcatatcgtgtttgtcctctccaaaatgacacagatacctacttaggtattccagcagacgtggcggcagttcttccagtagacgtggtgactgatcctaacatcttgctgggcatgcagacaacggtacacattgcggagctagtcaaggcatgtcatccgtcacccgatgttgtgagcgctgtaggggagcacctgaactggctcaacaaactcttactcccacttaaggaatcgactcagttgcaaggaagcgagtcgtacaaggagtgccttgcactcttgggtcgtgttcacgctgcgatgaagatggtgagaattggcttagtagtgccccagctgcaatacagaatgtacggtagcctcatcaaccaaatggcccaagtagcacaaaactacgaccgagaattcaagcaattcaaattattcatcatccaaaatcaaatccttggcagctatttgctgcagcagaacagggcatttgctgagagggagctgcagatggagagctttcatgctgctgtcatttctcaaagaagggaggagttggacaatacattcgcaaagatggaccgattgagcgggcaaatggaggcagagagtagtgcaatggagcaagccaaaaaggaaatggacgaaggattgaggcagttccagaataggcaagttgcgaacgccctctttgccgttcttagcgctgtagctcagattgggcttgcattccttacggctggtgcaacggctcctggagctgtggcgtcggcggggcaagctgtgagcatagcaggtcaggcggcgcaaggtctgcgaagggtggtggaaattctagagcagctggaggctgtgatggaggttgtggctgctgtgaaggacctcgtggattcattggaacaggtaggtcagattgtggacgcaccggtgatgccggaattgccctcagaggcggactggtccatttttgtgaacgaggtggaggccgtggcagagggcatgccaacggaagtctcggaggttccggtgtggagggccaagtgcaagaatgtggctgcactgggtcgggagatgagcatcacggcagtacagatgtcggagctgcagtatgacatctgggtgcaaggcatgatgcgggatatggctcgaagccaggcagacaggctggccgcaattcaacccgcggaccttaccaactatttggagatggctacccagatggatatgcggactacgaggatgctgctggggctcctcaacatattgcgcatccagaatgcggcgctcaggtacgagtatcttctaatgcccacggagctcacaacatggccactgggtatggataccgtgggtgacttgctcatcgcgcaggagaatgctgcactgataggattaatgcagctagggccctcatctgatttcacgagcaggcatgtggtgaaagacatacctgtgaacttgctgctcgatggcgaggattgggagtttgagattcctgtgcaagctggcatgtccagcttcccttccagctggtctcgcgtccgtattcggcacctggagatgcactttgtgaaggaggccagcggtattggtggtgagattatccaccagcctaccacccagactgggaccgtttacatccttctgcagggttccactatcttccatgaccgcagaagagaccaggtgttgccttttcaggccgctgctccgctcaactaccattacgcgtaccgcctcgacaccggcgactccactctcacaaacgaaccctctgaacagtttgccaacaagttcatgcagatgacacccttcacccgttggaggcttcgtctgtctgcgtccgcaaaagagaatgcaggattagcctttcccacggctacagcacttgactccactacccagattgtcatcactttccatgttacggccatcagacaaattgactggcggcacgacgaagag

SEQ ID NO: 221 - DNA, 2601 bp, Artificial Sequence
  Synthetic
atggctctcgtggattacggcaagcttttcgaggatctgaaccagataagcatgggtgtactggatcgggtagagttttcagaggtgatggtgatccacaggatgtatgtgaggctagctgatctgaatgtggggcagctcgagggagccgagaaagtgaggcacttgtatattttttccgacgttatcgagctaccagtcgtggaatggcggtggccgccgcaaataccaggatcggtgacggtgatcatattgtgtcgtcttcttcaatggccaactgatgggaggcagtcggacaccgagctccacctgacattcatgaagttgcatgccatacaacgagaggaaaatcggtgggagataaccgcagcagatggcatgaactggggagtttacatacacgcagaggaagtacaggttggcgtgctgacaatgtcatggtcttcggtacttagagtttcggcacttcgctctgttataacctccggctttcgcgccgttagtgtgtttgaggtaccgggaagtgtaaggtccacccttggagctactttaaggcccgatcacgccttatatagtacaactatgcaagccacacccaacgcatcgcatattagtgcttttaaccttcgcatagtttccccgtcggcatatcgtgtttgtcctctccaaaatgacacagatacctacttaggtattccagcagacgtggcggcagttcttccagtagacgtggtgactgatcctaacatcttgctgggcatgcagacaacggtacacattgcggagctagtcaaggcatgtcatccgtcacccgatgttgtgagcgctgtaggggagcacctgaactggctcaacaaactcttactcccacttaaggaatcgactcagttgcaaggaagcgagtcgtacaaggagtgccttgcactcttgggtcgtgttcacgctgcgatgaagatggtgagaattggcttagtagtgccccagctgcaatacagaatgtacggtagcctcatcaaccaaatggcccaagtagcacaaaactacgaccgagaattcaagcaattcaaattattcatcatccaaaatcaaatccttggcagctatttgctgcagcagaacagggcatttgctgagagggagctgcagatggagagctttcatgctgctgtcatttctcaaagaagggaggagttggacaatacattcgcaaagatggaccgattgagcgggcaaatggaggcagagagtagtgcaatggagcaagccaaaaaggaaatggacgaaggattgaggcagttccagaataggcaagttgcgaacgccctctttgccgttcttagcgctgtagctcagattgggcttgcattccttacggctggtgcaacggctcctggagctgtggcgtcggcggggcaagctgtgagcatagcaggtcaggcggcgcaaggtctgcgaagggtggtggaaattctagagcagctggaggctgtgatggaggttgtggctgctgtgaaggacctcgtggattcattggaacaggtaggtcagattgtggacgcaccggtgatgccggaattgccctcagaggcggactggtccatttttgtgaacgaggtggaggccgtggcagagggcatgccaacggaagtctcggaggttccggtgtggagggccaagtgcaagaatgtggctgcactgggtcgggagatgagcatcacggcagtacagatgtcggagctgcagtatgacatctgggtgcaaggcatgatgcgggatatggctcgaagccaggcagacaggctggccgcaattcaacccgcggaccttaccaactatttggagatggctacccagatggatatgcggactacgaggatgctgctggggctcctcaacatattgcgcatccagaatgcggcgctcaggtacgagtatcttctaatgcccacggagctcacaacatggccactgggtatggataccgtgggtgacttgctcatcgcgcaggagaatgctgcactgataggattaatgcagctagggccctcatctgatttcacgagcaggcatgtggtgaaagacatacctgtgaacttgctgctcgatggcgaggattgggagtttgagattcctgtgcaagctggcatgtccagcttcccttccagctggtctcgcgtccgtattcggcacctggagatgcactttgtgaaggaggccagcggtattggtggtgagattatccaccagcctaccacccagactgggaccgtttacatccttctgcagggttccactatcttccatgaccgcagaagagaccaggtgttgccttttcaggccgctgctccgctcaactaccattacgcgtaccgcctcgacaccggcgactccactctcacaaacgaaccctctgaacagtttgccaacaagttcatgcagatgacacccttcacccgttggaggcttcgtctgtctgcgtccgcaaaagagaatgcaggattagcctttcccacggctacagcacttgactccactacccagattgtcatcactttccatgttacggccatcagacaaattgactggcggcacgacgaagag

SEQ ID NO: 222 - DNA, 2601 bp, Artificial Sequence
  Synthetic
atggctctcgtggattacggcaagcttttcgaggatctgaaccagataagcatgggtgtactggatcgggtagagttttcagaggtgatggtgatccacaggatgtatgtgaggctagctgatctgaatgtggggcagctcgagggagccgagaaagtgaggcacttgtatatttttagcgacgttgtcgagctaccagtcgtggaatggcggtggccgccgcaaataccaggatcggtgacggtgatcatattgtgtcgtcttcttcaatggccaactgatgggaggcagtcggacaccgagctccacctgacattcatgaagttgcatgccatacaacgagaggaaaatcggtgggagataaccgcagcagatggcatgaactggggagtttacatacacgcagaggaagtacaggttggcgtgctgacaatgtcatggtcttcggtacttagagtttcggcacttcgctctgttataacctccggctttcgcgccgttagtgtgtttgaggtaccgggaagtgtaaggtccacccttggagctactttaaggcccgatcacgccttatatagtacaactatgcaagccacacccaacgcatcgcatattagtgcttttaaccttcgcatagtttccccgtcggcatatcgtgtttgtcctctccaaaatgacacagatacctacttaggtattccagcagacgtggcggcagttcttccagtagacgtggtgactgatcctaacatcttgctgggcatgcagacaacggtacacattgcggagctagtcaaggcatgtcatccgtcacccgatgttgtgagcgctgtaggggagcacctgaactggctcaacaaactcttactcccacttaaggaatcgactcagttgcaaggaagcgagtcgtacaaggagtgccttgcactcttgggtcgtgttcacgctgcgatgaagatggtgagaattggcttagtagtgccccagctgcaatacagaatgtacggtagcctcatcaaccaaatggcccaagtagcacaaaactacgaccgagaattcaagcaattcaaattattcatcatccaaaatcaaatccttggcagctatttgctgcagcagaacagggcatttgctgagagggagctgcagatggagagctttcatgctgctgtcatttctcaaagaagggaggagttggacaatacattcgcaaagatggaccgattgagcgggcaaatggaggcagagagtagtgcaatggagcaagccaaaaaggaaatggacgaaggattgaggcagttccagaataggcaagttgcgaacgccctctttgccgttcttagcgctgtagctcagattgggcttgcattccttacggctggtgcaacggctcctggagctgtggcgtcggcggggcaagctgtgagcatagcaggtcaggcggcgcaaggtctgcgaagggtggtggaaattctagagcagctggaggctgtgatggaggttgtggctgctgtgaaggacctcgtggattcattggaacaggtaggtcagattgtggacgcaccggtgatgccggaattgccctcagaggcggactggtccatttttgtgaacgaggtggaggccgtggcagagggcatgccaacggaagtctcggaggttccggtgtggagggccaagtgcaagaatgtggctgcactgggtcgggagatgagcatcacggcagtacagatgtcggagctgcagtatgacatctgggtgcaaggcatgatgcgggatatggctcgaagccaggcagacaggctggccgcaattcaacccgcggaccttaccaactatttggagatggctacccagatggatatgcggactacgaggatgctgctggggctcctcaacatattgcgcatccagaatgcggcgctcaggtacgagtatcttctaatgcccacggagctcacaacatggccactgggtatggataccgtgggtgacttgctcatcgcgcaggagaatgctgcactgataggattaatgcagctagggccctcatctgatttcacgagcaggcatgtggtgaaagacatacctgtgaacttgctgctcgatggcgaggattgggagtttgagattcctgtgcaagctggcatgtccagcttcccttccagctggtctcgcgtccgtattcggcacctggagatgcactttgtgaaggaggccagcggtattggtggtgagattatccaccagcctaccacccagactgggaccgtttacatccttctgcagggttccactatcttccatgaccgcagaagagaccaggtgttgccttttcaggccgctgctccgctcaactaccattacgcgtaccgcctcgacaccggcgactccactctcacaaacgaaccctctgaacagtttgccaacaagttcatgcagatgacacccttcacccgttggaggcttcgtctgtctgcgtccgcaaaagagaatgcaggattagcctttcccacggctacagcacttgactccactacccagattgtcatcactttccatgttacggccatcagacaaattgactggcggcacgacgaagag

SEQ ID NO: 223 - DNA, 2601 bp, Artificial Sequence
  Synthetic
atggctctcgtggattacggcaagcttttcgaggatctgaaccagataagcatgggtgtactggatcgggtagagttttcagaggtgatggtgatccacaggatgtatgtgaggctagctgatctgaatgtggggcagctcgagggagccgagaaagtgaggcacttgtatgtttttaccgacgttctcgagctaccagtcgtggaatggcggtggccaccgcaaataccaggatcggtgacggtgatcatattgtgtcgtcttcttcaatggccaactgatgggaggcagtcggacaccgagctccacctgacattcatgaagttgcatgccatacaacgagaggaaaatcggtgggagataaccgcagcagatggcatgaactggggagtttacatacacgcagaggaagtacaggttggcgtgctgacaatgtcatggtcttcggtacttagagtttcggcacttcgctctgttataacctccggctttcgcgccgttagtgtgtttgaggtaccgggaagtgtaaggtccacccttggagctactttaaggcccgatcacgccttatatagtacaactatgcaagccacacccaacgcatcgcatattagtgcttttaaccttcgcatagtttccccgtcggcatatcgtgtttgtcctctccaaaatgacacagatacctacttaggtattccagcagacgtggcggcagttcttccagtagacgtggtgactgatcctaacatcttgctgggcatgcagacaacggtacacattgcggagctagtcaaggcatgtcatccgtcacccgatgttgtgagcgctgtaggggagcacctgaactggctcaacaaactcttactcccacttaaggaatcgactcagttgcaaggaagcgagtcgtacaaggagtgccttgcactcttgggtcgtgttcacgctgcgatgaagatggtgagaattggcttagtagtgccccagctgcaatacagaatgtacggtagcctcatcaaccaaatggcccaagtagcacaaaactacgaccgagaattcaagcaattcaaattattcatcatccaaaatcaaatccttggcagctatttgctgcagcagaacagggcatttgctgagagggagctgcagatggagagctttcatgctgctgtcatttctcaaagaagggaggagttggacaatacattcgcaaagatggaccgattgagcgggcaaatggaggcagagagtagtgcaatggagcaagccaaaaaggaaatggacgaaggattgaggcagttccagaataggcaagttgcgaacgccctctttgccgttcttagcgctgtagctcagattgggcttgcattccttacggctggtgcaacggctcctggagctgtggcgtcggcggggcaagctgtgagcatagcaggtcaggcggcgcaaggtctgcgaagggtggtggaaattctagagcagctggaggctgtgatggaggttgtggctgctgtgaaggacctcgtggattcattggaacaggtaggtcagattgtggacgcaccggtgatgccggaattgccctcagaggcggactggtccatttttgtgaacgaggtggaggccgtggcagagggcatgccaacggaagtctcggaggttccggtgtggagggccaagtgcaagaatgtggctgcactgggtcgggagatgagcatcacggcagtacagatgtcggagctgcagtatgacatctgggtgcaaggcatgatgcgggatatggctcgaagccaggcagacaggctggccgcaattcaacccgcggaccttaccaactatttggagatggctacccagatggatatgcggactacgaggatgctgctggggctcctcaacatattgcgcatccagaatgcggcgctcaggtacgagtatcttctaatgcccacggagctcacaacatggccactgggtatggataccgtgggtgacttgctcatcgcgcaggagaatgctgcactgataggattaatgcagctagggccctcatctgatttcacgagcaggcatgtggtgaaagacatacctgtgaacttgctgctcgatggcgaggattgggagtttgagattcctgtgcaagctggcatgtccagcttcccttccagctggtctcgcgtccgtattcggcacctggagatgcactttgtgaaggaggccagcggtattggtggtgagattatccaccagcctaccacccagactgggaccgtttacatccttctgcagggttccactatcttccatgaccgcagaagagaccaggtgttgccttttcaggccgctgctccgctcaactaccattacgcgtaccgcctcgacaccggcgactccactctcacaaacgaaccctctgaacagtttgccaacaagttcatgcagatgacacccttcacccgttggaggcttcgtctgtctgcgtccgcaaaagagaatgcaggattagcctttcccacggctacagcacttgactccactacccagattgtcatcactttccatgttacggccatcagacaaattgactggcggcacgacgaagag

SEQ ID NO: 224 - DNA, 2601 bp, Artificial Sequence
  Synthetic
atggctctcgtggattacggcaagcttttcgaggatctgaaccagataagcatgggtgtactggatcgggtagagttttcagaggtgatggtgatccacaggatgtatgtgaggctagctgatctgaatgtggggcagctcgagggagccgagaaagtgaggcagttgtatattttttgcgacgttatcgtgctaccagtcgtggaatggcggtggccgccgcaaataccaggatcggtgacggtgatcatattgtgtcgtcttcttcaatggccaactgatgggaggcagtcggacaccgagctccacctgacattcatgaagttgcatgccatacaacgagaggaaaatcggtgggagataaccgcagcagatggcatgaactggggagtttacatacacgcagaggaagtacaggttggcgtgctgacaatgtcatggtcttcggtacttagagtttcggcacttcgctctgttataacctccggctttcgcgccgttagtgtgtttgaggtaccgggaagtgtaaggtccacccttggagctactttaaggcccgatcacgccttatatagtacaactatgcaagccacacccaacgcatcgcatattagtgcttttaaccttcgcatagtttccccgtcggcatatcgtgtttgtcctctccaaaatgacacagatacctacttaggtattccagcagacgtggcggcagttcttccagtagacgtggtgactgatcctaacatcttgctgggcatgcagacaacggtacacattgcggagctagtcaaggcatgtcatccgtcacccgatgttgtgagcgctgtaggggagcacctgaactggctcaacaaactcttactcccacttaaggaatcgactcagttgcaaggaagcgagtcgtacaaggagtgccttgcactcttgggtcgtgttcacgctgcgatgaagatggtgagaattggcttagtagtgccccagctgcaatacagaatgtacggtagcctcatcaaccaaatggcccaagtagcacaaaactacgaccgagaattcaagcaattcaaattattcatcatccaaaatcaaatccttggcagctatttgctgcagcagaacagggcatttgctgagagggagctgcagatggagagctttcatgctgctgtcatttctcaaagaagggaggagttggacaatacattcgcaaagatggaccgattgagcgggcaaatggaggcagagagtagtgcaatggagcaagccaaaaaggaaatggacgaaggattgaggcagttccagaataggcaagttgcgaacgccctctttgccgttcttagcgctgtagctcagattgggcttgcattccttacggctggtgcaacggctcctggagctgtggcgtcggcggggcaagctgtgagcatagcaggtcaggcggcgcaaggtctgcgaagggtggtggaaattctagagcagctggaggctgtgatggaggttgtggctgctgtgaaggacctcgtggattcattggaacaggtaggtcagattgtggacgcaccggtgatgccggaattgccctcagaggcggactggtccatttttgtgaacgaggtggaggccgtggcagagggcatgccaacggaagtctcggaggttccggtgtggagggccaagtgcaagaatgtggctgcactgggtcgggagatgagcatcacggcagtacagatgtcggagctgcagtatgacatctgggtgcaaggcatgatgcgggatatggctcgaagccaggcagacaggctggccgcaattcaacccgcggaccttaccaactatttggagatggctacccagatggatatgcggactacgaggatgctgctggggctcctcaacatattgcgcatccagaatgcggcgctcaggtacgagtatcttctaatgcccacggagctcacaacatggccactgggtatggataccgtgggtgacttgctcatcgcgcaggagaatgctgcactgataggattaatgcagctagggccctcatctgatttcacgagcaggcatgtggtgaaagacatacctgtgaacttgctgctcgatggcgaggattgggagtttgagattcctgtgcaagctggcatgtccagcttcccttccagctggtctcgcgtccgtattcggcacctggagatgcactttgtgaaggaggccagcggtattggtggtgagattatccaccagcctaccacccagactgggaccgtttacatccttctgcagggttccactatcttccatgaccgcagaagagaccaggtgttgccttttcaggccgctgctccgctcaactaccattacgcgtaccgcctcgacaccggcgactccactctcacaaacgaaccctctgaacagtttgccaacaagttcatgcagatgacacccttcacccgttggaggcttcgtctgtctgcgtccgcaaaagagaatgcaggattagcctttcccacggctacagcacttgactccactacccagattgtcatcactttccatgttacggccatcagacaaattgactggcggcacgacgaagag

SEQ ID NO: 225 - DNA, 2601 bp, Artificial Sequence
  Synthetic
atggctctcgtggattacggcaagcttttcgaggatctgaaccagataagcatgggtgtactggatcgggtagagttttcagaggtgatggtgatccacaggatgtatgtgaggctagctgatctgaatgtggggcagctcgagggagccgagaaagtgaggcagttgtatatttttagcgacgttgtcgtgctaccagtcgtggaatggcggtggccgccgcaaataccaggatcggtgacggtgatcatattgtgtcgtcttcttcaatggccaactgatgggaggcagtcggacaccgagctccacctgacattcatgaagttgcatgccatacaacgagaggaaaatcggtgggagataaccgcagcagatggcatgaactggggagtttacatacacgcagaggaagtacaggttggcgtgctgacaatgtcatggtcttcggtacttagagtttcggcacttcgctctgttataacctccggctttcgcgccgttagtgtgtttgaggtaccgggaagtgtaaggtccacccttggagctactttaaggcccgatcacgccttatatagtacaactatgcaagccacacccaacgcatcgcatattagtgcttttaaccttcgcatagtttccccgtcggcatatcgtgtttgtcctctccaaaatgacacagatacctacttaggtattccagcagacgtggcggcagttcttccagtagacgtggtgactgatcctaacatcttgctgggcatgcagacaacggtacacattgcggagctagtcaaggcatgtcatccgtcacccgatgttgtgagcgctgtaggggagcacctgaactggctcaacaaactcttactcccacttaaggaatcgactcagttgcaaggaagcgagtcgtacaaggagtgccttgcactcttgggtcgtgttcacgctgcgatgaagatggtgagaattggcttagtagtgccccagctgcaatacagaatgtacggtagcctcatcaaccaaatggcccaagtagcacaaaactacgaccgagaattcaagcaattcaaattattcatcatccaaaatcaaatccttggcagctatttgctgcagcagaacagggcatttgctgagagggagctgcagatggagagctttcatgctgctgtcatttctcaaagaagggaggagttggacaatacattcgcaaagatggaccgattgagcgggcaaatggaggcagagagtagtgcaatggagcaagccaaaaaggaaatggacgaaggattgaggcagttccagaataggcaagttgcgaacgccctctttgccgttcttagcgctgtagctcagattgggcttgcattccttacggctggtgcaacggctcctggagctgtggcgtcggcggggcaagctgtgagcatagcaggtcaggcggcgcaaggtctgcgaagggtggtggaaattctagagcagctggaggctgtgatggaggttgtggctgctgtgaaggacctcgtggattcattggaacaggtaggtcagattgtggacgcaccggtgatgccggaattgccctcagaggcggactggtccatttttgtgaacgaggtggaggccgtggcagagggcatgccaacggaagtctcggaggttccggtgtggagggccaagtgcaagaatgtggctgcactgggtcgggagatgagcatcacggcagtacagatgtcggagctgcagtatgacatctgggtgcaaggcatgatgcgggatatggctcgaagccaggcagacaggctggccgcaattcaacccgcggaccttaccaactatttggagatggctacccagatggatatgcggactacgaggatgctgctggggctcctcaacatattgcgcatccagaatgcggcgctcaggtacgagtatcttctaatgcccacggagctcacaacatggccactgggtatggataccgtgggtgacttgctcatcgcgcaggagaatgctgcactgataggattaatgcagctagggccctcatctgatttcacgagcaggcatgtggtgaaagacatacctgtgaacttgctgctcgatggcgaggattgggagtttgagattcctgtgcaagctggcatgtccagcttcccttccagctggtctcgcgtccgtattcggcacctggagatgcactttgtgaaggaggccagcggtattggtggtgagattatccaccagcctaccacccagactgggaccgtttacatccttctgcagggttccactatcttccatgaccgcagaagagaccaggtgttgccttttcaggccgctgctccgctcaactaccattacgcgtaccgcctcgacaccggcgactccactctcacaaacgaaccctctgaacagtttgccaacaagttcatgcagatgacacccttcacccgttggaggcttcgtctgtctgcgtccgcaaaagagaatgcaggattagcctttcccacggctacagcacttgactccactacccagattgtcatcactttccatgttacggccatcagacaaattgactggcggcacgacgaagag

SEQ ID NO: 226 - DNA, 2601 bp, Artificial Sequence
  Synthetic
atggctctcgtggattacggcaagcttttcgaggatctgaaccagataagcatgggtgtactggatcgggtagagttttcagaggtgatggtgatccacaggatgtatgtgaggctagctgatctgaatgtggggcagctcgagggagccgagaaagtgaggcagttgtatgttttttgcgacgttctcgtgctaccagtcgtggaatggcggtggccgccgcaaataccaggatcggtgacggtgatcatattgtgtcgtcttcttcaatggccaactgatgggaggcagtcggacaccgagctccacctgacattcatgaagttgcatgccatacaacgagaggaaaatcggtgggagataaccgcagcagatggcatgaactggggagtttacatacacgcagaggaagtacaggttggcgtgctgacaatgtcatggtcttcggtacttagagtttcggcacttcgctctgttataacctccggctttcgcgccgttagtgtgtttgaggtaccgggaagtgtaaggtccacccttggagctactttaaggcccgatcacgccttatatagtacaactatgcaagccacacccaacgcatcgcatattagtgcttttaaccttcgcatagtttccccgtcggcatatcgtgtttgtcctctccaaaatgacacagatacctacttaggtattccagcagacgtggcggcagttcttccagtagacgtggtgactgatcctaacatcttgctgggcatgcagacaacggtacacattgcggagctagtcaaggcatgtcatccgtcacccgatgttgtgagcgctgtaggggagcacctgaactggctcaacaaactcttactcccacttaaggaatcgactcagttgcaaggaagcgagtcgtacaaggagtgccttgcactcttgggtcgtgttcacgctgcgatgaagatggtgagaattggcttagtagtgccccagctgcaatacagaatgtacggtagcctcatcaaccaaatggcccaagtagcacaaaactacgaccgagaattcaagcaattcaaattattcatcatccaaaatcaaatccttggcagctatttgctgcagcagaacagggcatttgctgagagggagctgcagatggagagctttcatgctgctgtcatttctcaaagaagggaggagttggacaatacattcgcaaagatggaccgattgagcgggcaaatggaggcagagagtagtgcaatggagcaagccaaaaaggaaatggacgaaggattgaggcagttccagaataggcaagttgcgaacgccctctttgccgttcttagcgctgtagctcagattgggcttgcattccttacggctggtgcaacggctcctggagctgtggcgtcggcggggcaagctgtgagcatagcaggtcaggcggcgcaaggtctgcgaagggtggtggaaattctagagcagctggaggctgtgatggaggttgtggctgctgtgaaggacctcgtggattcattggaacaggtaggtcagattgtggacgcaccggtgatgccggaattgccctcagaggcggactggtccatttttgtgaacgaggtggaggccgtggcagagggcatgccaacggaagtctcggaggttccggtgtggagggccaagtgcaagaatgtggctgcactgggtcgggagatgagcatcacggcagtacagatgtcggagctgcagtatgacatctgggtgcaaggcatgatgcgggatatggctcgaagccaggcagacaggctggccgcaattcaacccgcggaccttaccaactatttggagatggctacccagatggatatgcggactacgaggatgctgctggggctcctcaacatattgcgcatccagaatgcggcgctcaggtacgagtatcttctaatgcccacggagctcacaacatggccactgggtatggataccgtgggtgacttgctcatcgcgcaggagaatgctgcactgataggattaatgcagctagggccctcatctgatttcacgagcaggcatgtggtgaaagacatacctgtgaacttgctgctcgatggcgaggattgggagtttgagattcctgtgcaagctggcatgtccagcttcccttccagctggtctcgcgtccgtattcggcacctggagatgcactttgtgaaggaggccagcggtattggtggtgagattatccaccagcctaccacccagactgggaccgtttacatccttctgcagggttccactatcttccatgaccgcagaagagaccaggtgttgccttttcaggccgctgctccgctcaactaccattacgcgtaccgcctcgacaccggcgactccactctcacaaacgaaccctctgaacagtttgccaacaagttcatgcagatgacacccttcacccgttggaggcttcgtctgtctgcgtccgcaaaagagaatgcaggattagcctttcccacggctacagcacttgactccactacccagattgtcatcactttccatgttacggccatcagacaaattgactggcggcacgacgaagag

SEQ ID NO: 227 - DNA, 2601 bp, Artificial Sequence
  Synthetic
atggctctcgtggattacggcaagcttttcgaggatctgaaccagataagcatgggtgtactggatcgggtagagttttcagaggtgatggtgatccacaggatgtatgtgaggctagctgatctgaatgtggggcagctcgagggagccgagaaagtgaggcggttgtatatttttgccgacattctcgagctaccagtcgtggaatggcggtggccgccgcaaataccaggatcggtgacggtgatcatattgtgtcgtcttcttcaatggccaactgatgggaggcagtcggacaccgagctccacctgacattcatgaagttgcatgccatacaacgagaggaaaatcggtgggagataaccgcagcagatggcatgaactggggagtttacatacacgcagaggaagtacaggttggcgtgctgacaatgtcatggtcttcggtacttagagtttcggcacttcgctctgttataacctccggctttcgcgccgttagtgtgtttgaggtaccgggaagtgtaaggtccacccttggagctactttaaggcccgatcacgccttatatagtacaactatgcaagccacacccaacgcatcgcatattagtgcttttaaccttcgcatagtttccccgtcggcatatcgtgtttgtcctctccaaaatgacacagatacctacttaggtattccagcagacgtggcggcagttcttccagtagacgtggtgactgatcctaacatcttgctgggcatgcagacaacggtacacattgcggagctagtcaaggcatgtcatccgtcacccgatgttgtgagcgctgtaggggagcacctgaactggctcaacaaactcttactcccacttaaggaatcgactcagttgcaaggaagcgagtcgtacaaggagtgccttgcactcttgggtcgtgttcacgctgcgatgaagatggtgagaattggcttagtagtgccccagctgcaatacagaatgtacggtagcctcatcaaccaaatggcccaagtagcacaaaactacgaccgagaattcaagcaattcaaattattcatcatccaaaatcaaatccttggcagctatttgctgcagcagaacagggcatttgctgagagggagctgcagatggagagctttcatgctgctgtcatttctcaaagaagggaggagttggacaatacattcgcaaagatggaccgattgagcgggcaaatggaggcagagagtagtgcaatggagcaagccaaaaaggaaatggacgaaggattgaggcagttccagaataggcaagttgcgaacgccctctttgccgttcttagcgctgtagctcagattgggcttgcattccttacggctggtgcaacggctcctggagctgtggcgtcggcggggcaagctgtgagcatagcaggtcaggcggcgcaaggtctgcgaagggtggtggaaattctagagcagctggaggctgtgatggaggttgtggctgctgtgaaggacctcgtggattcattggaacaggtaggtcagattgtggacgcaccggtgatgccggaattgccctcagaggcggactggtccatttttgtgaacgaggtggaggccgtggcagagggcatgccaacggaagtctcggaggttccggtgtggagggccaagtgcaagaatgtggctgcactgggtcgggagatgagcatcacggcagtacagatgtcggagctgcagtatgacatctgggtgcaaggcatgatgcgggatatggctcgaagccaggcagacaggctggccgcaattcaacccgcggaccttaccaactatttggagatggctacccagatggatatgcggactacgaggatgctgctggggctcctcaacatattgcgcatccagaatgcggcgctcaggtacgagtatcttctaatgcccacggagctcacaacatggccactgggtatggataccgtgggtgacttgctcatcgcgcaggagaatgctgcactgataggattaatgcagctagggccctcatctgatttcacgagcaggcatgtggtgaaagacatacctgtgaacttgctgctcgatggcgaggattgggagtttgagattcctgtgcaagctggcatgtccagcttcccttccagctggtctcgcgtccgtattcggcacctggagatgcactttgtgaaggaggccagcggtattggtggtgagattatccaccagcctaccacccagactgggaccgtttacatccttctgcagggttccactatcttccatgaccgcagaagagaccaggtgttgccttttcaggccgctgctccgctcaactaccattacgcgtaccgcctcgacaccggcgactccactctcacaaacgaaccctctgaacagtttgccaacaagttcatgcagatgacacccttcacccgttggaggcttcgtctgtctgcgtccgcaaaagagaatgcaggattagcctttcccacggctacagcacttgactccactacccagattgtcatcactttccatgttacggccatcagacaaattgactggcggcacgacgaagag

SEQ ID NO: 228 - DNA, 2601 bp, Artificial Sequence
  Synthetic
atggctctcgtggattacggcaagcttttcgaggatctgaaccagataagcatgggtgtactggatcgggtagagttttcagaggtgatggtgatccacaggatgtatgtgaggctagctgatctgaatgtggggcagctcgagggagccgagaaagtgaggcggttgtatatttttgccgacattgtcgagctaccagtcgtggaatggcggtggccggcgcaaataccaggatcggtgacggtgatcatattgtgtcgtcttcttcaatggccaactgatgggaggcagtcggacaccgagctccacctgacattcatgaagttgcatgccatacaacgagaggaaaatcggtgggagataaccgcagcagatggcatgaactggggagtttacatacacgcagaggaagtacaggttggcgtgctgacaatgtcatggtcttcggtacttagagtttcggcacttcgctctgttataacctccggctttcgcgccgttagtgtgtttgaggtaccgggaagtgtaaggtccacccttggagctactttaaggcccgatcacgccttatatagtacaactatgcaagccacacccaacgcatcgcatattagtgcttttaaccttcgcatagtttccccgtcggcatatcgtgtttgtcctctccaaaatgacacagatacctacttaggtattccagcagacgtggcggcagttcttccagtagacgtggtgactgatcctaacatcttgctgggcatgcagacaacggtacacattgcggagctagtcaaggcatgtcatccgtcacccgatgttgtgagcgctgtaggggagcacctgaactggctcaacaaactcttactcccacttaaggaatcgactcagttgcaaggaagcgagtcgtacaaggagtgccttgcactcttgggtcgtgttcacgctgcgatgaagatggtgagaattggcttagtagtgccccagctgcaatacagaatgtacggtagcctcatcaaccaaatggcccaagtagcacaaaactacgaccgagaattcaagcaattcaaattattcatcatccaaaatcaaatccttggcagctatttgctgcagcagaacagggcatttgctgagagggagctgcagatggagagctttcatgctgctgtcatttctcaaagaagggaggagttggacaatacattcgcaaagatggaccgattgagcgggcaaatggaggcagagagtagtgcaatggagcaagccaaaaaggaaatggacgaaggattgaggcagttccagaataggcaagttgcgaacgccctctttgccgttcttagcgctgtagctcagattgggcttgcattccttacggctggtgcaacggctcctggagctgtggcgtcggcggggcaagctgtgagcatagcaggtcaggcggcgcaaggtctgcgaagggtggtggaaattctagagcagctggaggctgtgatggaggttgtggctgctgtgaaggacctcgtggattcattggaacaggtaggtcagattgtggacgcaccggtgatgccggaattgccctcagaggcggactggtccatttttgtgaacgaggtggaggccgtggcagagggcatgccaacggaagtctcggaggttccggtgtggagggccaagtgcaagaatgtggctgcactgggtcgggagatgagcatcacggcagtacagatgtcggagctgcagtatgacatctgggtgcaaggcatgatgcgggatatggctcgaagccaggcagacaggctggccgcaattcaacccgcggaccttaccaactatttggagatggctacccagatggatatgcggactacgaggatgctgctggggctcctcaacatattgcgcatccagaatgcggcgctcaggtacgagtatcttctaatgcccacggagctcacaacatggccactgggtatggataccgtgggtgacttgctcatcgcgcaggagaatgctgcactgataggattaatgcagctagggccctcatctgatttcacgagcaggcatgtggtgaaagacatacctgtgaacttgctgctcgatggcgaggattgggagtttgagattcctgtgcaagctggcatgtccagcttcccttccagctggtctcgcgtccgtattcggcacctggagatgcactttgtgaaggaggccagcggtattggtggtgagattatccaccagcctaccacccagactgggaccgtttacatccttctgcagggttccactatcttccatgaccgcagaagagaccaggtgttgccttttcaggccgctgctccgctcaactaccattacgcgtaccgcctcgacaccggcgactccactctcacaaacgaaccctctgaacagtttgccaacaagttcatgcagatgacacccttcacccgttggaggcttcgtctgtctgcgtccgcaaaagagaatgcaggattagcctttcccacggctacagcacttgactccactacccagattgtcatcactttccatgttacggccatcagacaaattgactggcggcacgacgaagag

SEQ ID NO: 229 - DNA, 2601 bp, Artificial Sequence
  Synthetic
atggctctcgtggattacggcaagcttttcgaggatctgaaccagataagcatgggtgtactggatcgggtagagttttcagaggtgatggtgatccacaggatgtatgtgaggctagctgatctgaatgtggggcagctcgagggagccgagaaagtgaggcgcttgtatatttttggcgacattgtcgagctaccagtcgtggaatggcggtggccgccgcaaataccaggatcggtgacggtgatcatattgtgtcgtcttcttcaatggccaactgatgggaggcagtcggacaccgagctccacctgacattcatgaagttgcatgccatacaacgagaggaaaatcggtgggagataaccgcagcagatggcatgaactggggagtttacatacacgcagaggaagtacaggttggcgtgctgacaatgtcatggtcttcggtacttagagtttcggcacttcgctctgttataacctccggctttcgcgccgttagtgtgtttgaggtaccgggaagtgtaaggtccacccttggagctactttaaggcccgatcacgccttatatagtacaactatgcaagccacacccaacgcatcgcatattagtgcttttaaccttcgcatagtttccccgtcggcatatcgtgtttgtcctctccaaaatgacacagatacctacttaggtattccagcagacgtggcggcagttcttccagtagacgtggtgactgatcctaacatcttgctgggcatgcagacaacggtacacattgcggagctagtcaaggcatgtcatccgtcacccgatgttgtgagcgctgtaggggagcacctgaactggctcaacaaactcttactcccacttaaggaatcgactcagttgcaaggaagcgagtcgtacaaggagtgccttgcactcttgggtcgtgttcacgctgcgatgaagatggtgagaattggcttagtagtgccccagctgcaatacagaatgtacggtagcctcatcaaccaaatggcccaagtagcacaaaactacgaccgagaattcaagcaattcaaattattcatcatccaaaatcaaatccttggcagctatttgctgcagcagaacagggcatttgctgagagggagctgcagatggagagctttcatgctgctgtcatttctcaaagaagggaggagttggacaatacattcgcaaagatggaccgattgagcgggcaaatggaggcagagagtagtgcaatggagcaagccaaaaaggaaatggacgaaggattgaggcagttccagaataggcaagttgcgaacgccctctttgccgttcttagcgctgtagctcagattgggcttgcattccttacggctggtgcaacggctcctggagctgtggcgtcggcggggcaagctgtgagcatagcaggtcaggcggcgcaaggtctgcgaagggtggtggaaattctagagcagctggaggctgtgatggaggttgtggctgctgtgaaggacctcgtggattcattggaacaggtaggtcagattgtggacgcaccggtgatgccggaattgccctcagaggcggactggtccatttttgtgaacgaggtggaggccgtggcagagggcatgccaacggaagtctcggaggttccggtgtggagggccaagtgcaagaatgtggctgcactgggtcgggagatgagcatcacggcagtacagatgtcggagctgcagtatgacatctgggtgcaaggcatgatgcgggatatggctcgaagccaggcagacaggctggccgcaattcaacccgcggaccttaccaactatttggagatggctacccagatggatatgcggactacgaggatgctgctggggctcctcaacatattgcgcatccagaatgcggcgctcaggtacgagtatcttctaatgcccacggagctcacaacatggccactgggtatggataccgtgggtgacttgctcatcgcgcaggagaatgctgcactgataggattaatgcagctagggccctcatctgatttcacgagcaggcatgtggtgaaagacatacctgtgaacttgctgctcgatggcgaggattgggagtttgagattcctgtgcaagctggcatgtccagcttcccttccagctggtctcgcgtccgtattcggcacctggagatgcactttgtgaaggaggccagcggtattggtggtgagattatccaccagcctaccacccagactgggaccgtttacatccttctgcagggttccactatcttccatgaccgcagaagagaccaggtgttgccttttcaggccgctgctccgctcaactaccattacgcgtaccgcctcgacaccggcgactccactctcacaaacgaaccctctgaacagtttgccaacaagttcatgcagatgacacccttcacccgttggaggcttcgtctgtctgcgtccgcaaaagagaatgcaggattagcctttcccacggctacagcacttgactccactacccagattgtcatcactttccatgttacggccatcagacaaattgactggcggcacgacgaagag

SEQ ID NO: 230 - DNA, 2601 bp, Artificial Sequence
  Synthetic
atggctctcgtggattacggcaagcttttcgaggatctgaaccagataagcatgggtgtactggatcgggtagagttttcagaggtgatggtgatccacaggatgtatgtgaggctagctgatctgaatgtggggcagctcgagggagccgagaaagtgaggcgcttgtatatttttaccgacattatcgagctaccagtcgtggaatggcggtggccgccgcaaataccaggatcggtgacggtgatcatattgtgtcgtcttcttcaatggccaactgatgggaggcagtcggacaccgagctccacctgacattcatgaagttgcatgccatacaacgagaggaaaatcggtgggagataaccgcagcagatggcatgaactggggagtttacatacacgcagaggaagtacaggttggcgtgctgacaatgtcatggtcttcggtacttagagtttcggcacttcgctctgttataacctccggctttcgcgccgttagtgtgtttgaggtaccgggaagtgtaaggtccacccttggagctactttaaggcccgatcacgccttatatagtacaactatgcaagccacacccaacgcatcgcatattagtgcttttaaccttcgcatagtttccccgtcggcatatcgtgtttgtcctctccaaaatgacacagatacctacttaggtattccagcagacgtggcggcagttcttccagtagacgtggtgactgatcctaacatcttgctgggcatgcagacaacggtacacattgcggagctagtcaaggcatgtcatccgtcacccgatgttgtgagcgctgtaggggagcacctgaactggctcaacaaactcttactcccacttaaggaatcgactcagttgcaaggaagcgagtcgtacaaggagtgccttgcactcttgggtcgtgttcacgctgcgatgaagatggtgagaattggcttagtagtgccccagctgcaatacagaatgtacggtagcctcatcaaccaaatggcccaagtagcacaaaactacgaccgagaattcaagcaattcaaattattcatcatccaaaatcaaatccttggcagctatttgctgcagcagaacagggcatttgctgagagggagctgcagatggagagctttcatgctgctgtcatttctcaaagaagggaggagttggacaatacattcgcaaagatggaccgattgagcgggcaaatggaggcagagagtagtgcaatggagcaagccaaaaaggaaatggacgaaggattgaggcagttccagaataggcaagttgcgaacgccctctttgccgttcttagcgctgtagctcagattgggcttgcattccttacggctggtgcaacggctcctggagctgtggcgtcggcggggcaagctgtgagcatagcaggtcaggcggcgcaaggtctgcgaagggtggtggaaattctagagcagctggaggctgtgatggaggttgtggctgctgtgaaggacctcgtggattcattggaacaggtaggtcagattgtggacgcaccggtgatgccggaattgccctcagaggcggactggtccatttttgtgaacgaggtggaggccgtggcagagggcatgccaacggaagtctcggaggttccggtgtggagggccaagtgcaagaatgtggctgcactgggtcgggagatgagcatcacggcagtacagatgtcggagctgcagtatgacatctgggtgcaaggcatgatgcgggatatggctcgaagccaggcagacaggctggccgcaattcaacccgcggaccttaccaactatttggagatggctacccagatggatatgcggactacgaggatgctgctggggctcctcaacatattgcgcatccagaatgcggcgctcaggtacgagtatcttctaatgcccacggagctcacaacatggccactgggtatggataccgtgggtgacttgctcatcgcgcaggagaatgctgcactgataggattaatgcagctagggccctcatctgatttcacgagcaggcatgtggtgaaagacatacctgtgaacttgctgctcgatggcgaggattgggagtttgagattcctgtgcaagctggcatgtccagcttcccttccagctggtctcgcgtccgtattcggcacctggagatgcactttgtgaaggaggccagcggtattggtggtgagattatccaccagcctaccacccagactgggaccgtttacatccttctgcagggttccactatcttccatgaccgcagaagagaccaggtgttgccttttcaggccgctgctccgctcaactaccattacgcgtaccgcctcgacaccggcgactccactctcacaaacgaaccctctgaacagtttgccaacaagttcatgcagatgacacccttcacccgttggaggcttcgtctgtctgcgtccgcaaaagagaatgcaggattagcctttcccacggctacagcacttgactccactacccagattgtcatcactttccatgttacggccatcagacaaattgactggcggcacgacgaagag

SEQ ID NO: 231 - DNA, 2601 bp, Artificial Sequence
  Synthetic
atggctctcgtggattacggcaagcttttcgaggatctgaaccagataagcatgggtgtactggatcgggtagagttttcagaggtgatggtgatccacaggatgtatgtgaggctagctgatctgaatgtggggcagctcgagggagccgagaaagtgaggcgcttgtatgtttttgccgacattatcgacctaccagtcgtggaatggcggtggccgccgcaaataccaggatcggtgacggtgatcatattgtgtcgtcttcttcaatggccaactgatgggaggcagtcggacaccgagctccacctgacattcatgaagttgcatgccatacaacgagaggaaaatcggtgggagataaccgcagcagatggcatgaactggggagtttacatacacgcagaggaagtacaggttggcgtgctgacaatgtcatggtcttcggtacttagagtttcggcacttcgctctgttataacctccggctttcgcgccgttagtgtgtttgaggtaccgggaagtgtaaggtccacccttggagctactttaaggcccgatcacgccttatatagtacaactatgcaagccacacccaacgcatcgcatattagtgcttttaaccttcgcatagtttccccgtcggcatatcgtgtttgtcctctccaaaatgacacagatacctacttaggtattccagcagacgtggcggcagttcttccagtagacgtggtgactgatcctaacatcttgctgggcatgcagacaacggtacacattgcggagctagtcaaggcatgtcatccgtcacccgatgttgtgagcgctgtaggggagcacctgaactggctcaacaaactcttactcccacttaaggaatcgactcagttgcaaggaagcgagtcgtacaaggagtgccttgcactcttgggtcgtgttcacgctgcgatgaagatggtgagaattggcttagtagtgccccagctgcaatacagaatgtacggtagcctcatcaaccaaatggcccaagtagcacaaaactacgaccgagaattcaagcaattcaaattattcatcatccaaaatcaaatccttggcagctatttgctgcagcagaacagggcatttgctgagagggagctgcagatggagagctttcatgctgctgtcatttctcaaagaagggaggagttggacaatacattcgcaaagatggaccgattgagcgggcaaatggaggcagagagtagtgcaatggagcaagccaaaaaggaaatggacgaaggattgaggcagttccagaataggcaagttgcgaacgccctctttgccgttcttagcgctgtagctcagattgggcttgcattccttacggctggtgcaacggctcctggagctgtggcgtcggcggggcaagctgtgagcatagcaggtcaggcggcgcaaggtctgcgaagggtggtggaaattctagagcagctggaggctgtgatggaggttgtggctgctgtgaaggacctcgtggattcattggaacaggtaggtcagattgtggacgcaccggtgatgccggaattgccctcagaggcggactggtccatttttgtgaacgaggtggaggccgtggcagagggcatgccaacggaagtctcggaggttccggtgtggagggccaagtgcaagaatgtggctgcactgggtcgggagatgagcatcacggcagtacagatgtcggagctgcagtatgacatctgggtgcaaggcatgatgcgggatatggctcgaagccaggcagacaggctggccgcaattcaacccgcggaccttaccaactatttggagatggctacccagatggatatgcggactacgaggatgctgctggggctcctcaacatattgcgcatccagaatgcggcgctcaggtacgagtatcttctaatgcccacggagctcacaacatggccactgggtatggataccgtgggtgacttgctcatcgcgcaggagaatgctgcactgataggattaatgcagctagggccctcatctgatttcacgagcaggcatgtggtgaaagacatacctgtgaacttgctgctcgatggcgaggattgggagtttgagattcctgtgcaagctggcatgtccagcttcccttccagctggtctcgcgtccgtattcggcacctggagatgcactttgtgaaggaggccagcggtattggtggtgagattatccaccagcctaccacccagactgggaccgtttacatccttctgcagggttccactatcttccatgaccgcagaagagaccaggtgttgccttttcaggccgctgctccgctcaactaccattacgcgtaccgcctcgacaccggcgactccactctcacaaacgaaccctctgaacagtttgccaacaagttcatgcagatgacacccttcacccgttggaggcttcgtctgtctgcgtccgcaaaagagaatgcaggattagcctttcccacggctacagcacttgactccactacccagattgtcatcactttccatgttacggccatcagacaaattgactggcggcacgacgaagag

SEQ ID NO: 232 - DNA, 2601 bp, Artificial Sequence
  Synthetic
atggctctcgtggattacggcaagcttttcgaggatctgaaccagataagcatgggtgtactggatcgggtagagttttcagaggtgatggtgatccacaggatgtatgtgaggctagctgatctgaatgtggggcagctcgagggagccgagaaagtgaggcggttgtatgtttttgccgacattgtcgtgctaccagtcgtggaatggcggtggccgccgcaaataccaggatcggtgacggtgatcatattgtgtcgtcttcttcaatggccaactgatgggaggcagtcggacaccgagctccacctgacattcatgaagttgcatgccatacaacgagaggaaaatcggtgggagataaccgcagcagatggcatgaactggggagtttacatacacgcagaggaagtacaggttggcgtgctgacaatgtcatggtcttcggtacttagagtttcggcacttcgctctgttataacctccggctttcgcgccgttagtgtgtttgaggtaccgggaagtgtaaggtccacccttggagctactttaaggcccgatcacgccttatatagtacaactatgcaagccacacccaacgcatcgcatattagtgcttttaaccttcgcatagtttccccgtcggcatatcgtgtttgtcctctccaaaatgacacagatacctacttaggtattccagcagacgtggcggcagttcttccagtagacgtggtgactgatcctaacatcttgctgggcatgcagacaacggtacacattgcggagctagtcaaggcatgtcatccgtcacccgatgttgtgagcgctgtaggggagcacctgaactggctcaacaaactcttactcccacttaaggaatcgactcagttgcaaggaagcgagtcgtacaaggagtgccttgcactcttgggtcgtgttcacgctgcgatgaagatggtgagaattggcttagtagtgccccagctgcaatacagaatgtacggtagcctcatcaaccaaatggcccaagtagcacaaaactacgaccgagaattcaagcaattcaaattattcatcatccaaaatcaaatccttggcagctatttgctgcagcagaacagggcatttgctgagagggagctgcagatggagagctttcatgctgctgtcatttctcaaagaagggaggagttggacaatacattcgcaaagatggaccgattgagcgggcaaatggaggcagagagtagtgcaatggagcaagccaaaaaggaaatggacgaaggattgaggcagttccagaataggcaagttgcgaacgccctctttgccgttcttagcgctgtagctcagattgggcttgcattccttacggctggtgcaacggctcctggagctgtggcgtcggcggggcaagctgtgagcatagcaggtcaggcggcgcaaggtctgcgaagggtggtggaaattctagagcagctggaggctgtgatggaggttgtggctgctgtgaaggacctcgtggattcattggaacaggtaggtcagattgtggacgcaccggtgatgccggaattgccctcagaggcggactggtccatttttgtgaacgaggtggaggccgtggcagagggcatgccaacggaagtctcggaggttccggtgtggagggccaagtgcaagaatgtggctgcactgggtcgggagatgagcatcacggcagtacagatgtcggagctgcagtatgacatctgggtgcaaggcatgatgcgggatatggctcgaagccaggcagacaggctggccgcaattcaacccgcggaccttaccaactatttggagatggctacccagatggatatgcggactacgaggatgctgctggggctcctcaacatattgcgcatccagaatgcggcgctcaggtacgagtatcttctaatgcccacggagctcacaacatggccactgggtatggataccgtgggtgacttgctcatcgcgcaggagaatgctgcactgataggattaatgcagctagggccctcatctgatttcacgagcaggcatgtggtgaaagacatacctgtgaacttgctgctcgatggcgaggattgggagtttgagattcctgtgcaagctggcatgtccagcttcccttccagctggtctcgcgtccgtattcggcacctggagatgcactttgtgaaggaggccagcggtattggtggtgagattatccaccagcctaccacccagactgggaccgtttacatccttctgcagggttccactatcttccatgaccgcagaagagaccaggtgttgccttttcaggccgctgctccgctcaactaccattacgcgtaccgcctcgacaccggcgactccactctcacaaacgaaccctctgaacagtttgccaacaagttcatgcagatgacacccttcacccgttggaggcttcgtctgtctgcgtccgcaaaagagaatgcaggattagcctttcccacggctacagcacttgactccactacccagattgtcatcactttccatgttacggccatcagacaaattgactggcggcacgacgaagag

SEQ ID NO: 233 - DNA, 2601 bp, Artificial Sequence
  Synthetic
atggctctcgtggattacggcaagcttttcgaggatctgaaccagataagcatgggtgtactggatcgggtagagttttcagaggtgatggtgatccacaggatgtatgtgaggctagctgatctgaatgtggggcagctcgagggagccgagaaagtgaggcgcttgtatgttttttgcgacgttgtcgtgctaccagtcgtggaatggcggtggccgccgcaaataccaggatcggtgacggtgatcatattgtgtcgtcttcttcaatggccaactgatgggaggcagtcggacaccgagctccacctgacattcatgaagttgcatgccatacaacgagaggaaaatcggtgggagataaccgcagcagatggcatgaactggggagtttacatacacgcagaggaagtacaggttggcgtgctgacaatgtcatggtcttcggtacttagagtttcggcacttcgctctgttataacctccggctttcgcgccgttagtgtgtttgaggtaccgggaagtgtaaggtccacccttggagctactttaaggcccgatcacgccttatatagtacaactatgcaagccacacccaacgcatcgcatattagtgcttttaaccttcgcatagtttccccgtcggcatatcgtgtttgtcctctccaaaatgacacagatacctacttaggtattccagcagacgtggcggcagttcttccagtagacgtggtgactgatcctaacatcttgctgggcatgcagacaacggtacacattgcggagctagtcaaggcatgtcatccgtcacccgatgttgtgagcgctgtaggggagcacctgaactggctcaacaaactcttactcccacttaaggaatcgactcagttgcaaggaagcgagtcgtacaaggagtgccttgcactcttgggtcgtgttcacgctgcgatgaagatggtgagaattggcttagtagtgccccagctgcaatacagaatgtacggtagcctcatcaaccaaatggcccaagtagcacaaaactacgaccgagaattcaagcaattcaaattattcatcatccaaaatcaaatccttggcagctatttgctgcagcagaacagggcatttgctgagagggagctgcagatggagagctttcatgctgctgtcatttctcaaagaagggaggagttggacaatacattcgcaaagatggaccgattgagcgggcaaatggaggcagagagtagtgcaatggagcaagccaaaaaggaaatggacgaaggattgaggcagttccagaataggcaagttgcgaacgccctctttgccgttcttagcgctgtagctcagattgggcttgcattccttacggctggtgcaacggctcctggagctgtggcgtcggcggggcaagctgtgagcatagcaggtcaggcggcgcaaggtctgcgaagggtggtggaaattctagagcagctggaggctgtgatggaggttgtggctgctgtgaaggacctcgtggattcattggaacaggtaggtcagattgtggacgcaccggtgatgccggaattgccctcagaggcggactggtccatttttgtgaacgaggtggaggccgtggcagagggcatgccaacggaagtctcggaggttccggtgtggagggccaagtgcaagaatgtggctgcactgggtcgggagatgagcatcacggcagtacagatgtcggagctgcagtatgacatctgggtgcaaggcatgatgcgggatatggctcgaagccaggcagacaggctggccgcaattcaacccgcggaccttaccaactatttggagatggctacccagatggatatgcggactacgaggatgctgctggggctcctcaacatattgcgcatccagaatgcggcgctcaggtacgagtatcttctaatgcccacggagctcacaacatggccactgggtatggataccgtgggtgacttgctcatcgcgcaggagaatgctgcactgataggattaatgcagctagggccctcatctgatttcacgagcaggcatgtggtgaaagacatacctgtgaacttgctgctcgatggcgaggattgggagtttgagattcctgtgcaagctggcatgtccagcttcccttccagctggtctcgcgtccgtattcggcacctggagatgcactttgtgaaggaggccagcggtattggtggtgagattatccaccagcctaccacccagactgggaccgtttacatccttctgcagggttccactatcttccatgaccgcagaagagaccaggtgttgccttttcaggccgctgctccgctcaactaccattacgcgtaccgcctcgacaccggcgactccactctcacaaacgaaccctctgaacagtttgccaacaagttcatgcagatgacacccttcacccgttggaggcttcgtctgtctgcgtccgcaaaagagaatgcaggattagcctttcccacggctacagcacttgactccactacccagattgtcatcactttccatgttacggccatcagacaaattgactggcggcacgacgaagag

SEQ ID NO: 234 - DNA, 2601 bp, Artificial Sequence
  Synthetic
atggctctcgtggattacggcaagcttttcgaggatctgaaccagataagcatgggtgtactggatcgggtagagttttcagaggtgatggtgatccacaggatgtatgtgaggctagctgatctgaatgtggggcagctcgagggagccgagaaagtgaggcggttgtatgtttttaccgacattatcgagctaccagtcgtggaatggcggtggccgccgcaaataccaggatcggtgacggtgatcatattgtgtcgtcttcttcaatggccaactgatgggaggcagtcggacaccgagctccacctgacattcatgaagttgcatgccatacaacgagaggaaaatcggtgggagataaccgcagcagatggcatgaactggggagtttacatacacgcagaggaagtacaggttggcgtgctgacaatgtcatggtcttcggtacttagagtttcggcacttcgctctgttataacctccggctttcgcgccgttagtgtgtttgaggtaccgggaagtgtaaggtccacccttggagctactttaaggcccgatcacgccttatatagtacaactatgcaagccacacccaacgcatcgcatattagtgcttttaaccttcgcatagtttccccgtcggcatatcgtgtttgtcctctccaaaatgacacagatacctacttaggtattccagcagacgtggcggcagttcttccagtagacgtggtgactgatcctaacatcttgctgggcatgcagacaacggtacacattgcggagctagtcaaggcatgtcatccgtcacccgatgttgtgagcgctgtaggggagcacctgaactggctcaacaaactcttactcccacttaaggaatcgactcagttgcaaggaagcgagtcgtacaaggagtgccttgcactcttgggtcgtgttcacgctgcgatgaagatggtgagaattggcttagtagtgccccagctgcaatacagaatgtacggtagcctcatcaaccaaatggcccaagtagcacaaaactacgaccgagaattcaagcaattcaaattattcatcatccaaaatcaaatccttggcagctatttgctgcagcagaacagggcatttgctgagagggagctgcagatggagagctttcatgctgctgtcatttctcaaagaagggaggagttggacaatacattcgcaaagatggaccgattgagcgggcaaatggaggcagagagtagtgcaatggagcaagccaaaaaggaaatggacgaaggattgaggcagttccagaataggcaagttgcgaacgccctctttgccgttcttagcgctgtagctcagattgggcttgcattccttacggctggtgcaacggctcctggagctgtggcgtcggcggggcaagctgtgagcatagcaggtcaggcggcgcaaggtctgcgaagggtggtggaaattctagagcagctggaggctgtgatggaggttgtggctgctgtgaaggacctcgtggattcattggaacaggtaggtcagattgtggacgcaccggtgatgccggaattgccctcagaggcggactggtccatttttgtgaacgaggtggaggccgtggcagagggcatgccaacggaagtctcggaggttccggtgtggagggccaagtgcaagaatgtggctgcactgggtcgggagatgagcatcacggcagtacagatgtcggagctgcagtatgacatctgggtgcaaggcatgatgcgggatatggctcgaagccaggcagacaggctggccgcaattcaacccgcggaccttaccaactatttggagatggctacccagatggatatgcggactacgaggatgctgctggggctcctcaacatattgcgcatccagaatgcggcgctcaggtacgagtatcttctaatgcccacggagctcacaacatggccactgggtatggataccgtgggtgacttgctcatcgcgcaggagaatgctgcactgataggattaatgcagctagggccctcatctgatttcacgagcaggcatgtggtgaaagacatacctgtgaacttgctgctcgatggcgaggattgggagtttgagattcctgtgcaagctggcatgtccagcttcccttccagctggtctcgcgtccgtattcggcacctggagatgcactttgtgaaggaggccagcggtattggtggtgagattatccaccagcctaccacccagactgggaccgtttacatccttctgcagggttccactatcttccatgaccgcagaagagaccaggtgttgccttttcaggccgctgctccgctcaactaccattacgcgtaccgcctcgacaccggcgactccactctcacaaacgaaccctctgaacagtttgccaacaagttcatgcagatgacacccttcacccgttggaggcttcgtctgtctgcgtccgcaaaagagaatgcaggattagcctttcccacggctacagcacttgactccactacccagattgtcatcactttccatgttacggccatcagacaaattgactggcggcacgacgaagag

SEQ ID NO: 235 - DNA, 2601 bp, Artificial Sequence
  Synthetic
atggctctcgtggattacggcaagcttttcgaggatctgaaccagataagcatgggtgtactggatcgggtagagttttcagaggtgatggtgatccacaggatgtatgtgaggctagctgatctgaatgtggggcagctcgagggagccgagaaagtgaggcggttgtatgtttttaccgacgttctcgtgctaccagtcgtggaatggcggtggccgccgcaaataccaggatcggtgacggtgatcatattgtgtcgtcttcttcaatggccaactgatgggaggcagtcggacaccgagctccacctgacattcatgaagttgcatgccatacaacgagaggaaaatcggtgggagataaccgcagcagatggcatgaactggggagtttacatacacgcagaggaagtacaggttggcgtgctgacaatgtcatggtcttcggtacttagagtttcggcacttcgctctgttataacctccggctttcgcgccgttagtgtgtttgaggtaccgggaagtgtaaggtccacccttggagctactttaaggcccgatcacgccttatatagtacaactatgcaagccacacccaacgcatcgcatattagtgcttttaaccttcgcatagtttccccgtcggcatatcgtgtttgtcctctccaaaatgacacagatacctacttaggtattccagcagacgtggcggcagttcttccagtagacgtggtgactgatcctaacatcttgctgggcatgcagacaacggtacacattgcggagctagtcaaggcatgtcatccgtcacccgatgttgtgagcgctgtaggggagcacctgaactggctcaacaaactcttactcccacttaaggaatcgactcagttgcaaggaagcgagtcgtacaaggagtgccttgcactcttgggtcgtgttcacgctgcgatgaagatggtgagaattggcttagtagtgccccagctgcaatacagaatgtacggtagcctcatcaaccaaatggcccaagtagcacaaaactacgaccgagaattcaagcaattcaaattattcatcatccaaaatcaaatccttggcagctatttgctgcagcagaacagggcatttgctgagagggagctgcagatggagagctttcatgctgctgtcatttctcaaagaagggaggagttggacaatacattcgcaaagatggaccgattgagcgggcaaatggaggcagagagtagtgcaatggagcaagccaaaaaggaaatggacgaaggattgaggcagttccagaataggcaagttgcgaacgccctctttgccgttcttagcgctgtagctcagattgggcttgcattccttacggctggtgcaacggctcctggagctgtggcgtcggcggggcaagctgtgagcatagcaggtcaggcggcgcaaggtctgcgaagggtggtggaaattctagagcagctggaggctgtgatggaggttgtggctgctgtgaaggacctcgtggattcattggaacaggtaggtcagattgtggacgcaccggtgatgccggaattgccctcagaggcggactggtccatttttgtgaacgaggtggaggccgtggcagagggcatgccaacggaagtctcggaggttccggtgtggagggccaagtgcaagaatgtggctgcactgggtcgggagatgagcatcacggcagtacagatgtcggagctgcagtatgacatctgggtgcaaggcatgatgcgggatatggctcgaagccaggcagacaggctggccgcaattcaacccgcggaccttaccaactatttggagatggctacccagatggatatgcggactacgaggatgctgctggggctcctcaacatattgcgcatccagaatgcggcgctcaggtacgagtatcttctaatgcccacggagctcacaacatggccactgggtatggataccgtgggtgacttgctcatcgcgcaggagaatgctgcactgataggattaatgcagctagggccctcatctgatttcacgagcaggcatgtggtgaaagacatacctgtgaacttgctgctcgatggcgaggattgggagtttgagattcctgtgcaagctggcatgtccagcttcccttccagctggtctcgcgtccgtattcggcacctggagatgcactttgtgaaggaggccagcggtattggtggtgagattatccaccagcctaccacccagactgggaccgtttacatccttctgcagggttccactatcttccatgaccgcagaagagaccaggtgttgccttttcaggccgctgctccgctcaactaccattacgcgtaccgcctcgacaccggcgactccactctcacaaacgaaccctctgaacagtttgccaacaagttcatgcagatgacacccttcacccgttggaggcttcgtctgtctgcgtccgcaaaagagaatgcaggattagcctttcccacggctacagcacttgactccactacccagattgtcatcactttccatgttacggccatcagacaaattgactggcggcacgacgaagag

SEQ ID NO: 236 - protein, 867 aa, Artificial Sequence
  Synthetic
MALVDYGKLFEDLNQISMGVLDRVEFSEVMVIHRMYVRLADLNVGQLEGAEKVKHLYIFCDVIELPVVEWRWPPQIPGSVTVIILCRLLQWPTDGRQSDTELHLTFMKLHAIQREENRWEITAADGMNWGVYIHAEEVQVGVLTMSWSSVLRVSALRSVITSGFRAVSVFEVPGSVRSTLGATLRPDHALYSTTMQATPNASHISAFNLRIVSPSAYRVCPLQNDTDTYLGIPADVAAVLPVDVVTDPNILLGMQTTVHIAELVKACHPSPDVVSAVGEHLNWLNKLLLPLKESTQLQGSESYKECLALLGRVHAAMKMVRIGLVVPQLQYRMYGSLINQMAQVAQNYDREFKQFKLFIIQNQILGSYLLQQNRAFAERELQMESFHAAVISQRREELDNTFAKMDRLSGQMEAESSAMEQAKKEMDEGLRQFQNRQVANALFAVLSAVAQIGLAFLTAGATAPGAVASAGQAVSIAGQAAQGLRRVVEILEQLEAVMEVVAAVKDLVDSLEQVGQIVDAPVMPELPSEADWSIFVNEVEAVAEGMPTEVSEVPVWRAKCKNVAALGREMSITAVQMSELQYDIWVQGMMRDMARSQADRLAAIQPADLTNYLEMATQMDMRTTRMLLGLLNILRIQNAALRYEYLLMPTELTTWPLGMDTVGDLLIAQENAALIGLMQLGPSSDFTSRHVVKDIPVNLLLDGEDWEFEIPVQAGMSSFPSSWSRVRIRHLEMHFVKEASGIGGEIIHQPTTQTGTVYILLQGSTIFHDRRRDQVLPFQAAAPLNYHYAYRLDTGDSTLTNEPSEQFANKFMQMTPFTRWRLRLSASAKENAGLAFPTATALDSTTQIVITFHVTAIRQIDWRHDEE

SEQ ID NO: 237 - protein, 867 aa, Artificial Sequence
  Synthetic
MALVDYGKLFEDLNQISMGVLDRVEFSEVMVIHRMYVRLADLNVGQLEGAEKVKHLYIFCDVVELPVVEWRWPPQIPGSVTVIILCRLLQWPTDGRQSDTELHLTFMKLHAIQREENRWEITAADGMNWGVYIHAEEVQVGVLTMSWSSVLRVSALRSVITSGFRAVSVFEVPGSVRSTLGATLRPDHALYSTTMQATPNASHISAFNLRIVSPSAYRVCPLQNDTDTYLGIPADVAAVLPVDVVTDPNILLGMQTTVHIAELVKACHPSPDVVSAVGEHLNWLNKLLLPLKESTQLQGSESYKECLALLGRVHAAMKMVRIGLVVPQLQYRMYGSLINQMAQVAQNYDREFKQFKLFIIQNQILGSYLLQQNRAFAERELQMESFHAAVISQRREELDNTFAKMDRLSGQMEAESSAMEQAKKEMDEGLRQFQNRQVANALFAVLSAVAQIGLAFLTAGATAPGAVASAGQAVSIAGQAAQGLRRVVEILEQLEAVMEVVAAVKDLVDSLEQVGQIVDAPVMPELPSEADWSIFVNEVEAVAEGMPTEVSEVPVWRAKCKNVAALGREMSITAVQMSELQYDIWVQGMMRDMARSQADRLAAIQPADLTNYLEMATQMDMRTTRMLLGLLNILRIQNAALRYEYLLMPTELTTWPLGMDTVGDLLIAQENAALIGLMQLGPSSDFTSRHVVKDIPVNLLLDGEDWEFEIPVQAGMSSFPSSWSRVRIRHLEMHFVKEASGIGGEIIHQPTTQTGTVYILLQGSTIFHDRRRDQVLPFQAAAPLNYHYAYRLDTGDSTLTNEPSEQFANKFMQMTPFTRWRLRLSASAKENAGLAFPTATALDSTTQIVITFHVTAIRQIDWRHDEE

SEQ ID NO: 238 - protein, 867 aa, Artificial Sequence
  Synthetic
MALVDYGKLFEDLNQISMGVLDRVEFSEVMVIHRMYVRLADLNVGQLEGAEKVKHLYIFSDIIELPVVEWRWPPQIPGSVTVIILCRLLQWPTDGRQSDTELHLTFMKLHAIQREENRWEITAADGMNWGVYIHAEEVQVGVLTMSWSSVLRVSALRSVITSGFRAVSVFEVPGSVRSTLGATLRPDHALYSTTMQATPNASHISAFNLRIVSPSAYRVCPLQNDTDTYLGIPADVAAVLPVDVVTDPNILLGMQTTVHIAELVKACHPSPDVVSAVGEHLNWLNKLLLPLKESTQLQGSESYKECLALLGRVHAAMKMVRIGLVVPQLQYRMYGSLINQMAQVAQNYDREFKQFKLFIIQNQILGSYLLQQNRAFAERELQMESFHAAVISQRREELDNTFAKMDRLSGQMEAESSAMEQAKKEMDEGLRQFQNRQVANALFAVLSAVAQIGLAFLTAGATAPGAVASAGQAVSIAGQAAQGLRRVVEILEQLEAVMEVVAAVKDLVDSLEQVGQIVDAPVMPELPSEADWSIFVNEVEAVAEGMPTEVSEVPVWRAKCKNVAALGREMSITAVQMSELQYDIWVQGMMRDMARSQADRLAAIQPADLTNYLEMATQMDMRTTRMLLGLLNILRIQNAALRYEYLLMPTELTTWPLGMDTVGDLLIAQENAALIGLMQLGPSSDFTSRHVVKDIPVNLLLDGEDWEFEIPVQAGMSSFPSSWSRVRIRHLEMHFVKEASGIGGEIIHQPTTQTGTVYILLQGSTIFHDRRRDQVLPFQAAAPLNYHYAYRLDTGDSTLTNEPSEQFANKFMQMTPFTRWRLRLSASAKENAGLAFPTATALDSTTQIVITFHVTAIRQIDWRHDEE

SEQ ID NO: 239 - protein, 867 aa, Artificial Sequence
  Synthetic
MALVDYGKLFEDLNQISMGVLDRVEFSEVMVIHRMYVRLADLNVGQLEGAEKVKHLYIFTDVLELPVVEWRWPPQIPGSVTVIILCRLLQWPTDGRQSDTELHLTFMKLHAIQREENRWEITAADGMNWGVYIHAEEVQVGVLTMSWSSVLRVSALRSVITSGFRAVSVFEVPGSVRSTLGATLRPDHALYSTTMQATPNASHISAFNLRIVSPSAYRVCPLQNDTDTYLGIPADVAAVLPVDVVTDPNILLGMQTTVHIAELVKACHPSPDVVSAVGEHLNWLNKLLLPLKESTQLQGSESYKECLALLGRVHAAMKMVRIGLVVPQLQYRMYGSLINQMAQVAQNYDREFKQFKLFIIQNQILGSYLLQQNRAFAERELQMESFHAAVISQRREELDNTFAKMDRLSGQMEAESSAMEQAKKEMDEGLRQFQNRQVANALFAVLSAVAQIGLAFLTAGATAPGAVASAGQAVSIAGQAAQGLRRVVEILEQLEAVMEVVAAVKDLVDSLEQVGQIVDAPVMPELPSEADWSIFVNEVEAVAEGMPTEVSEVPVWRAKCKNVAALGREMSITAVQMSELQYDIWVQGMMRDMARSQADRLAAIQPADLTNYLEMATQMDMRTTRMLLGLLNILRIQNAALRYEYLLMPTELTTWPLGMDTVGDLLIAQENAALIGLMQLGPSSDFTSRHVVKDIPVNLLLDGEDWEFEIPVQAGMSSFPSSWSRVRIRHLEMHFVKEASGIGGEIIHQPTTQTGTVYILLQGSTIFHDRRRDQVLPFQAAAPLNYHYAYRLDTGDSTLTNEPSEQFANKFMQMTPFTRWRLRLSASAKENAGLAFPTATALDSTTQIVITFHVTAIRQIDWRHDEE

SEQ ID NO: 240 - protein, 867 aa, Artificial Sequence
  Synthetic
MALVDYGKLFEDLNQISMGVLDRVEFSEVMVIHRMYVRLADLNVGQLEGAEKVKHLYVFADIIVLPVVEWRWPPQIPGSVTVIILCRLLQWPTDGRQSDTELHLTFMKLHAIQREENRWEITAADGMNWGVYIHAEEVQVGVLTMSWSSVLRVSALRSVITSGFRAVSVFEVPGSVRSTLGATLRPDHALYSTTMQATPNASHISAFNLRIVSPSAYRVCPLQNDTDTYLGIPADVAAVLPVDVVTDPNILLGMQTTVHIAELVKACHPSPDVVSAVGEHLNWLNKLLLPLKESTQLQGSESYKECLALLGRVHAAMKMVRIGLVVPQLQYRMYGSLINQMAQVAQNYDREFKQFKLFIIQNQILGSYLLQQNRAFAERELQMESFHAAVISQRREELDNTFAKMDRLSGQMEAESSAMEQAKKEMDEGLRQFQNRQVANALFAVLSAVAQIGLAFLTAGATAPGAVASAGQAVSIAGQAAQGLRRVVEILEQLEAVMEVVAAVKDLVDSLEQVGQIVDAPVMPELPSEADWSIFVNEVEAVAEGMPTEVSEVPVWRAKCKNVAALGREMSITAVQMSELQYDIWVQGMMRDMARSQADRLAAIQPADLTNYLEMATQMDMRTTRMLLGLLNILRIQNAALRYEYLLMPTELTTWPLGMDTVGDLLIAQENAALIGLMQLGPSSDFTSRHVVKDIPVNLLLDGEDWEFEIPVQAGMSSFPSSWSRVRIRHLEMHFVKEASGIGGEIIHQPTTQTGTVYILLQGSTIFHDRRRDQVLPFQAAAPLNYHYAYRLDTGDSTLTNEPSEQFANKFMQMTPFTRWRLRLSASAKENAGLAFPTATALDSTTQIVITFHVTAIRQIDWRHDEE

SEQ ID NO: 241 - protein, 867 aa, Artificial Sequence
  Synthetic
MALVDYGKLFEDLNQISMGVLDRVEFSEVMVIHRMYVRLADLNVGQLEGAEKVKHLYVFADVIELPVVEWRWPPQIPGSVTVIILCRLLQWPTDGRQSDTELHLTFMKLHAIQREENRWEITAADGMNWGVYIHAEEVQVGVLTMSWSSVLRVSALRSVITSGFRAVSVFEVPGSVRSTLGATLRPDHALYSTTMQATPNASHISAFNLRIVSPSAYRVCPLQNDTDTYLGIPADVAAVLPVDVVTDPNILLGMQTTVHIAELVKACHPSPDVVSAVGEHLNWLNKLLLPLKESTQLQGSESYKECLALLGRVHAAMKMVRIGLVVPQLQYRMYGSLINQMAQVAQNYDREFKQFKLFIIQNQILGSYLLQQNRAFAERELQMESFHAAVISQRREELDNTFAKMDRLSGQMEAESSAMEQAKKEMDEGLRQFQNRQVANALFAVLSAVAQIGLAFLTAGATAPGAVASAGQAVSIAGQAAQGLRRVVEILEQLEAVMEVVAAVKDLVDSLEQVGQIVDAPVMPELPSEADWSIFVNEVEAVAEGMPTEVSEVPVWRAKCKNVAALGREMSITAVQMSELQYDIWVQGMMRDMARSQADRLAAIQPADLTNYLEMATQMDMRTTRMLLGLLNILRIQNAALRYEYLLMPTELTTWPLGMDTVGDLLIAQENAALIGLMQLGPSSDFTSRHVVKDIPVNLLLDGEDWEFEIPVQAGMSSFPSSWSRVRIRHLEMHFVKEASGIGGEIIHQPTTQTGTVYILLQGSTIFHDRRRDQVLPFQAAAPLNYHYAYRLDTGDSTLTNEPSEQFANKFMQMTPFTRWRLRLSASAKENAGLAFPTATALDSTTQIVITFHVTAIRQIDWRHDEE

SEQ ID NO: 242 - protein, 867 aa, Artificial Sequence
  Synthetic
MALVDYGKLFEDLNQISMGVLDRVEFSEVMVIHRMYVRLADLNVGQLEGAEKVKHLYVFGDVIELPVVEWRWPPQIPGSVTVIILCRLLQWPTDGRQSDTELHLTFMKLHAIQREENRWEITAADGMNWGVYIHAEEVQVGVLTMSWSSVLRVSALRSVITSGFRAVSVFEVPGSVRSTLGATLRPDHALYSTTMQATPNASHISAFNLRIVSPSAYRVCPLQNDTDTYLGIPADVAAVLPVDVVTDPNILLGMQTTVHIAELVKACHPSPDVVSAVGEHLNWLNKLLLPLKESTQLQGSESYKECLALLGRVHAAMKMVRIGLVVPQLQYRMYGSLINQMAQVAQNYDREFKQFKLFIIQNQILGSYLLQQNRAFAERELQMESFHAAVISQRREELDNTFAKMDRLSGQMEAESSAMEQAKKEMDEGLRQFQNRQVANALFAVLSAVAQIGLAFLTAGATAPGAVASAGQAVSIAGQAAQGLRRVVEILEQLEAVMEVVAAVKDLVDSLEQVGQIVDAPVMPELPSEADWSIFVNEVEAVAEGMPTEVSEVPVWRAKCKNVAALGREMSITAVQMSELQYDIWVQGMMRDMARSQADRLAAIQPADLTNYLEMATQMDMRTTRMLLGLLNILRIQNAALRYEYLLMPTELTTWPLGMDTVGDLLIAQENAALIGLMQLGPSSDFTSRHVVKDIPVNLLLDGEDWEFEIPVQAGMSSFPSSWSRVRIRHLEMHFVKEASGIGGEIIHQPTTQTGTVYILLQGSTIFHDRRRDQVLPFQAAAPLNYHYAYRLDTGDSTLTNEPSEQFANKFMQMTPFTRWRLRLSASAKENAGLAFPTATALDSTTQIVITFHVTAIRQIDWRHDEE

SEQ ID NO: 243 - protein, 867 aa, Artificial Sequence
  Synthetic
MALVDYGKLFEDLNQISMGVLDRVEFSEVMVIHRMYVRLADLNVGQLEGAEKVKHLYVFSDVIELPVVEWRWPPQIPGSVTVIILCRLLQWPTDGRQSDTELHLTFMKLHAIQREENRWEITAADGMNWGVYIHAEEVQVGVLTMSWSSVLRVSALRSVITSGFRAVSVFEVPGSVRSTLGATLRPDHALYSTTMQATPNASHISAFNLRIVSPSAYRVCPLQNDTDTYLGIPADVAAVLPVDVVTDPNILLGMQTTVHIAELVKACHPSPDVVSAVGEHLNWLNKLLLPLKESTQLQGSESYKECLALLGRVHAAMKMVRIGLVVPQLQYRMYGSLINQMAQVAQNYDREFKQFKLFIIQNQILGSYLLQQNRAFAERELQMESFHAAVISQRREELDNTFAKMDRLSGQMEAESSAMEQAKKEMDEGLRQFQNRQVANALFAVLSAVAQIGLAFLTAGATAPGAVASAGQAVSIAGQAAQGLRRVVEILEQLEAVMEVVAAVKDLVDSLEQVGQIVDAPVMPELPSEADWSIFVNEVEAVAEGMPTEVSEVPVWRAKCKNVAALGREMSITAVQMSELQYDIWVQGMMRDMARSQADRLAAIQPADLTNYLEMATQMDMRTTRMLLGLLNILRIQNAALRYEYLLMPTELTTWPLGMDTVGDLLIAQENAALIGLMQLGPSSDFTSRHVVKDIPVNLLLDGEDWEFEIPVQAGMSSFPSSWSRVRIRHLEMHFVKEASGIGGEIIHQPTTQTGTVYILLQGSTIFHDRRRDQVLPFQAAAPLNYHYAYRLDTGDSTLTNEPSEQFANKFMQMTPFTRWRLRLSASAKENAGLAFPTATALDSTTQIVITFHVTAIRQIDWRHDEE

SEQ ID NO: 244 - protein, 867 aa, Artificial Sequence
  Synthetic
MALVDYGKLFEDLNQISMGVLDRVEFSEVMVIHRMYVRLADLNVGQLEGAEKVKHLYVFSDVLVLPVVEWRWPPQIPGSVTVIILCRLLQWPTDGRQSDTELHLTFMKLHAIQREENRWEITAADGMNWGVYIHAEEVQVGVLTMSWSSVLRVSALRSVITSGFRAVSVFEVPGSVRSTLGATLRPDHALYSTTMQATPNASHISAFNLRIVSPSAYRVCPLQNDTDTYLGIPADVAAVLPVDVVTDPNILLGMQTTVHIAELVKACHPSPDVVSAVGEHLNWLNKLLLPLKESTQLQGSESYKECLALLGRVHAAMKMVRIGLVVPQLQYRMYGSLINQMAQVAQNYDREFKQFKLFIIQNQILGSYLLQQNRAFAERELQMESFHAAVISQRREELDNTFAKMDRLSGQMEAESSAMEQAKKEMDEGLRQFQNRQVANALFAVLSAVAQIGLAFLTAGATAPGAVASAGQAVSIAGQAAQGLRRVVEILEQLEAVMEVVAAVKDLVDSLEQVGQIVDAPVMPELPSEADWSIFVNEVEAVAEGMPTEVSEVPVWRAKCKNVAALGREMSITAVQMSELQYDIWVQGMMRDMARSQADRLAAIQPADLTNYLEMATQMDMRTTRMLLGLLNILRIQNAALRYEYLLMPTELTTWPLGMDTVGDLLIAQENAALIGLMQLGPSSDFTSRHVVKDIPVNLLLDGEDWEFEIPVQAGMSSFPSSWSRVRIRHLEMHFVKEASGIGGEIIHQPTTQTGTVYILLQGSTIFHDRRRDQVLPFQAAAPLNYHYAYRLDTGDSTLTNEPSEQFANKFMQMTPFTRWRLRLSASAKENAGLAFPTATALDSTTQIVITFHVTAIRQIDWRHDEE

SEQ ID NO: 245 - protein, 867 aa, Artificial Sequence
  Synthetic
MALVDYGKLFEDLNQISMGVLDRVEFSEVMVIHRMYVRLADLNVGQLEGAEKVKQLIIFSDIIELPVVEWRWPPQIPGSVTVIILCRLLQWPTDGRQSDTELHLTFMKLHAIQREENRWEITAADGMNWGVYIHAEEVQVGVLTMSWSSVLRVSALRSVITSGFRAVSVFEVPGSVRSTLGATLRPDHALYSTTMQATPNASHISAFNLRIVSPSAYRVCPLQNDTDTYLGIPADVAAVLPVDVVTDPNILLGMQTTVHIAELVKACHPSPDVVSAVGEHLNWLNKLLLPLKESTQLQGSESYKECLALLGRVHAAMKMVRIGLVVPQLQYRMYGSLINQMAQVAQNYDREFKQFKLFIIQNQILGSYLLQQNRAFAERELQMESFHAAVISQRREELDNTFAKMDRLSGQMEAESSAMEQAKKEMDEGLRQFQNRQVANALFAVLSAVAQIGLAFLTAGATAPGAVASAGQAVSIAGQAAQGLRRVVEILEQLEAVMEVVAAVKDLVDSLEQVGQIVDAPVMPELPSEADWSIFVNEVEAVAEGMPTEVSEVPVWRAKCKNVAALGREMSITAVQMSELQYDIWVQGMMRDMARSQADRLAAIQPADLTNYLEMATQMDMRTTRMLLGLLNILRIQNAALRYEYLLMPTELTTWPLGMDTVGDLLIAQENAALIGLMQLGPSSDFTSRHVVKDIPVNLLLDGEDWEFEIPVQAGMSSFPSSWSRVRIRHLEMHFVKEASGIGGEIIHQPTTQTGTVYILLQGSTIFHDRRRDQVLPFQAAAPLNYHYAYRLDTGDSTLTNEPSEQFANKFMQMTPFTRWRLRLSASAKENAGLAFPTATALDSTTQIVITFHVTAIRQIDWRHDEE

SEQ ID NO: 246 - protein, 867 aa, Artificial Sequence
  Synthetic
MALVDYGKLFEDLNQISMGVLDRVEFSEVMVIHRMYVRLADLNVGQLEGAEKVKQLYIFCDIIELPVVEWRWPPQIPGSVTVIILCRLLQWPTDGRQSDTELHLTFMKLHAIQREENRWEITAADGMNWGVYIHAEEVQVGVLTMSWSSVLRVSALRSVITSGFRAVSVFEVPGSVRSTLGATLRPDHALYSTTMQATPNASHISAFNLRIVSPSAYRVCPLQNDTDTYLGIPADVAAVLPVDVVTDPNILLGMQTTVHIAELVKACHPSPDVVSAVGEHLNWLNKLLLPLKESTQLQGSESYKECLALLGRVHAAMKMVRIGLVVPQLQYRMYGSLINQMAQVAQNYDREFKQFKLFIIQNQILGSYLLQQNRAFAERELQMESFHAAVISQRREELDNTFAKMDRLSGQMEAESSAMEQAKKEMDEGLRQFQNRQVANALFAVLSAVAQIGLAFLTAGATAPGAVASAGQAVSIAGQAAQGLRRVVEILEQLEAVMEVVAAVKDLVDSLEQVGQIVDAPVMPELPSEADWSIFVNEVEAVAEGMPTEVSEVPVWRAKCKNVAALGREMSITAVQMSELQYDIWVQGMMRDMARSQADRLAAIQPADLTNYLEMATQMDMRTTRMLLGLLNILRIQNAALRYEYLLMPTELTTWPLGMDTVGDLLIAQENAALIGLMQLGPSSDFTSRHVVKDIPVNLLLDGEDWEFEIPVQAGMSSFPSSWSRVRIRHLEMHFVKEASGIGGEIIHQPTTQTGTVYILLQGSTIFHDRRRDQVLPFQAAAPLNYHYAYRLDTGDSTLTNEPSEQFANKFMQMTPFTRWRLRLSASAKENAGLAFPTATALDSTTQIVITFHVTAIRQIDWRHDEE

SEQ ID NO: 247 - protein, 867 aa, Artificial Sequence
  Synthetic
MALVDYGKLFEDLNQISMGVLDRVEFSEVMVIHRMYVRLADLNVGQLEGAEKVKQLYIFCDVLELPVVEWRWPPQIPGSVTVIILCRLLQWPTDGRQSDTELHLTFMKLHAIQREENRWEITAADGMNWGVYIHAEEVQVGVLTMSWSSVLRVSALRSVITSGFRAVSVFEVPGSVRSTLGATLRPDHALYSTTMQATPNASHISAFNLRIVSPSAYRVCPLQNDTDTYLGIPADVAAVLPVDVVTDPNILLGMQTTVHIAELVKACHPSPDVVSAVGEHLNWLNKLLLPLKESTQLQGSESYKECLALLGRVHAAMKMVRIGLVVPQLQYRMYGSLINQMAQVAQNYDREFKQFKLFIIQNQILGSYLLQQNRAFAERELQMESFHAAVISQRREELDNTFAKMDRLSGQMEAESSAMEQAKKEMDEGLRQFQNRQVANALFAVLSAVAQIGLAFLTAGATAPGAVASAGQAVSIAGQAAQGLRRVVEILEQLEAVMEVVAAVKDLVDSLEQVGQIVDAPVMPELPSEADWSIFVNEVEAVAEGMPTEVSEVPVWRAKCKNVAALGREMSITAVQMSELQYDIWVQGMMRDMARSQADRLAAIQPADLTNYLEMATQMDMRTTRMLLGLLNILRIQNAALRYEYLLMPTELTTWPLGMDTVGDLLIAQENAALIGLMQLGPSSDFTSRHVVKDIPVNLLLDGEDWEFEIPVQAGMSSFPSSWSRVRIRHLEMHFVKEASGIGGEIIHQPTTQTGTVYILLQGSTIFHDRRRDQVLPFQAAAPLNYHYAYRLDTGDSTLTNEPSEQFANKFMQMTPFTRWRLRLSASAKENAGLAFPTATALDSTTQIVITFHVTAIRQIDWRHDEE

SEQ ID NO: 248 - protein, 867 aa, Artificial Sequence
  Synthetic
MALVDYGKLFEDLNQISMGVLDRVEFSEVMVIHRMYVRLADLNVGQLEGAEKVKQLYIFGDVIELPVVEWRWPPQIPGSVTVIILCRLLQWPTDGRQSDTELHLTFMKLHAIQREENRWEITAADGMNWGVYIHAEEVQVGVLTMSWSSVLRVSALRSVITSGFRAVSVFEVPGSVRSTLGATLRPDHALYSTTMQATPNASHISAFNLRIVSPSAYRVCPLQNDTDTYLGIPADVAAVLPVDVVTDPNILLGMQTTVHIAELVKACHPSPDVVSAVGEHLNWLNKLLLPLKESTQLQGSESYKECLALLGRVHAAMKMVRIGLVVPQLQYRMYGSLINQMAQVAQNYDREFKQFKLFIIQNQILGSYLLQQNRAFAERELQMESFHAAVISQRREELDNTFAKMDRLSGQMEAESSAMEQAKKEMDEGLRQFQNRQVANALFAVLSAVAQIGLAFLTAGATAPGAVASAGQAVSIAGQAAQGLRRVVEILEQLEAVMEVVAAVKDLVDSLEQVGQIVDAPVMPELPSEADWSIFVNEVEAVAEGMPTEVSEVPVWRAKCKNVAALGREMSITAVQMSELQYDIWVQGMMRDMARSQADRLAAIQPADLTNYLEMATQMDMRTTRMLLGLLNILRIQNAALRYEYLLMPTELTTWPLGMDTVGDLLIAQENAALIGLMQLGPSSDFTSRHVVKDIPVNLLLDGEDWEFEIPVQAGMSSFPSSWSRVRIRHLEMHFVKEASGIGGEIIHQPTTQTGTVYILLQGSTIFHDRRRDQVLPFQAAAPLNYHYAYRLDTGDSTLTNEPSEQFANKFMQMTPFTRWRLRLSASAKENAGLAFPTATALDSTTQIVITFHVTAIRQIDWRHDEE

SEQ ID NO: 249 - protein, 867 aa, Artificial Sequence
  Synthetic
MALVDYGKLFEDLNQISMGVLDRIEFSEVMVIHRMYVRLADLNVGQLEGAEKVKQLYIFSDIIELPVVEWRWPPQIPGSVTVIILCRLLQWPTDGRQSDTELHLTFMKLHAIQREENRWEITAADGMNWGVYIHAEEVQVGVLTMSWSSVLRVSALRSVITSGFRAVSVFEVPGSVRSTLGATLRPDHALYSTTMQATPNASHISAFNLRIVSPSAYRVCPLQNDTDTYLGIPADVAAVLPVDVVTDPNILLGMQTTVHIAELVKACHPSPDVVSAVGEHLNWLNKLLLPLKESTQLQGSESYKECLALLGRVHAAMKMVRIGLVVPQLQYRMYGSLINQMAQVAQNYDREFKQFKLFIIQNQILGSYLLQQNRAFAERELQMESFHAAVISQRREELDNTFAKMDRLSGQMEAESSAMEQAKKEMDEGLRQFQNRQVANALFAVLSAVAQIGLAFLTAGATAPGAVASAGQAVSIAGQAAQGLRRVVEILEQLEAVMEVVAAVKDLVDSLEQVGQIVDAPVMPELPSEADWSIFVNEVEAVAEGMPTEVSEVPVWRAKCKNVAALGREMSITAVQMSELQYDIWVQGMMRDMARSQADRLAAIQPADLTNYLEMATQMDMRTTRMLLGLLNILRIQNAALRYEYLLMPTELTTWPLGMDTVGDLLIAQENAALIGLMQLGPSSDFTSRHVVKDIPVNLLLDGEDWEFEIPVQAGMSSFPSSWSRVRIRHLEMHFVKEASGIGGEIIHQPTTQTGTVYILLQGSTIFHDRRRDQVLPFQAAAPLNYHYAYRLDTGDSTLTNEPSEQFANKFMQMTPFTRWRLRLSASAKENAGLAFPTATALDSTTQIVITFHVTAIRQIDWRHDEE

SEQ ID NO: 250 - protein, 867 aa, Artificial Sequence
  Synthetic
MALVDYGKLFEDLNQISMGVLDRVEFSEVMVIHRMYVRLADLNVGQLEGAEKVKQLYVFCDILELPVVEWRWPPQIPGSVTVIILCRLLQWPTDGRQSDTELHLTFMKLHAIQREENRWEITAADGMNWGVYIHAEEVQVGVLTMSWSSVLRVSALRSVITSGFRAVSVFEVPGSVRSTLGATLRPDHALYSTTMQATPNASHISAFNLRIVSPSAYRVCPLQNDTDTYLGIPADVAAVLPVDVVTDPNILLGMQTTVHIAELVKACHPSPDVVSAVGEHLNWLNKLLLPLKESTQLQGSESYKECLALLGRVHAAMKMVRIGLVVPQLQYRMYGSLINQMAQVAQNYDREFKQFKLFIIQNQILGSYLLQQNRAFAERELQMESFHAAVISQRREELDNTFAKMDRLSGQMEAESSAMEQAKKEMDEGLRQFQNRQVANALFAVLSAVAQIGLAFLTAGATAPGAVASAGQAVSIAGQAAQGLRRVVEILEQLEAVMEVVAAVKDLVDSLEQVGQIVDAPVMPELPSEADWSIFVNEVEAVAEGMPTEVSEVPVWRAKCKNVAALGREMSITAVQMSELQYDIWVQGMMRDMARSQADRLAAIQPADLTNYLEMATQMDMRTTRMLLGLLNILRIQNAALRYEYLLMPTELTTWPLGMDTVGDLLIAQENAALIGLMQLGPSSDFTSRHVVKDIPVNLLLDGEDWEFEIPVQAGMSSFPSSWSRVRIRHLEMHFVKEASGIGGEIIHQPTTQTGTVYILLQGSTIFHDRRRDQVLPFQAAAPLNYHYAYRLDTGDSTLTNEPSEQFANKFMQMTPFTRWRLRLSASAKENAGLAFPTATALDSTTQIVITFHVTAIRQIDWRHDEE

SEQ ID NO: 251 - protein, 867 aa, Artificial Sequence
  Synthetic
MALVDYGKLFEDLNQISMGVLDRVEFSEVMVIHRMYVRLADLNVGQLEGAEKVKQLYVFSDILELPVVEWRWPPQIPGSVTVIILCRLLQWPTDGRQSDTELHLTFMKLHAIQREENRWEITAADGMNWGVYIHAEEVQVGVLTMSWSSVLRVSALRSVITSGFRAVSVFEVPGSVRSTLGATLRPDHALYSTTMQATPNASHISAFNLRIVSPSAYRVCPLQNDTDTYLGIPADVAAVLPVDVVTDPNILLGMQTTVHIAELVKACHPSPDVVSAVGEHLNWLNKLLLPLKESTQLQGSESYKECLALLGRVHAAMKMVRIGLVVPQLQYRMYGSLINQMAQVAQNYDREFKQFKLFIIQNQILGSYLLQQNRAFAERELQMESFHAAVISQRREELDNTFAKMDRLSGQMEAESSAMEQAKKEMDEGLRQFQNRQVANALFAVLSAVAQIGLAFLTAGATAPGAVASAGQAVSIAGQAAQGLRRVVEILEQLEAVMEVVAAVKDLVDSLEQVGQIVDAPVMPELPSEADWSIFVNEVEAVAEGMPTEVSEVPVWRAKCKNVAALGREMSITAVQMSELQYDIWVQGMMRDMARSQADRLAAIQPADLTNYLEMATQMDMRTTRMLLGLLNILRIQNAALRYEYLLMPTELTTWPLGMDTVGDLLIAQENAALIGLMQLGPSSDFTSRHVVKDIPVNLLLDGEDWEFEIPVQAGMSSFPSSWSRVRIRHLEMHFVKEASGIGGEIIHQPTTQTGTVYILLQGSTIFHDRRRDQVLPFQAAAPLNYHYAYRLDTGDSTLTNEPSEQFANKFMQMTPFTRWRLRLSASAKENAGLAFPTATALDSTTQIVITFHVTAIRQIDWRHDEE

SEQ ID NO: 252 - protein, 867 aa, Artificial Sequence
  Synthetic
MALVDYGKLFEDLNQISMGVLDRVEFSEVMVIHRMYVRLADLNVGQLEGAEKVKQLYVFSDVLVLPVVEWRWPPQIPGSVTVIILCRLLQWPTDGRQSDTELHLTFMKLHAIQREENRWEITAADGMNWGVYIHAEEVQVGVLTMSWSSVLRVSALRSVITSGFRAVSVFEVPGSVRSTLGATLRPDHALYSTTMQATPNASHISAFNLRIVSPSAYRVCPLQNDTDTYLGIPADVAAVLPVDVVTDPNILLGMQTTVHIAELVKACHPSPDVVSAVGEHLNWLNKLLLPLKESTQLQGSESYKECLALLGRVHAAMKMVRIGLVVPQLQYRMYGSLINQMAQVAQNYDREFKQFKLFIIQNQILGSYLLQQNRAFAERELQMESFHAAVISQRREELDNTFAKMDRLSGQMEAESSAMEQAKKEMDEGLRQFQNRQVANALFAVLSAVAQIGLAFLTAGATAPGAVASAGQAVSIAGQAAQGLRRVVEILEQLEAVMEVVAAVKDLVDSLEQVGQIVDAPVMPELPSEADWSIFVNEVEAVAEGMPTEVSEVPVWRAKCKNVAALGREMSITAVQMSELQYDIWVQGMMRDMARSQADRLAAIQPADLTNYLEMATQMDMRTTRMLLGLLNILRIQNAALRYEYLLMPTELTTWPLGMDTVGDLLIAQENAALIGLMQLGPSSDFTSRHVVKDIPVNLLLDGEDWEFEIPVQAGMSSFPSSWSRVRIRHLEMHFVKEASGIGGEIIHQPTTQTGTVYILLQGSTIFHDRRRDQVLPFQAAAPLNYHYAYRLDTGDSTLTNEPSEQFANKFMQMTPFTRWRLRLSASAKENAGLAFPTATALDSTTQIVITFHVTAIRQIDWRHDEE

SEQ ID NO: 253 - protein, 867 aa, Artificial Sequence
  Synthetic
MALVDYGKLFEDLNQISMGVLDRVEFSEVMVIHRMYVRLADLNVGQLEGAEKVKRFYIFADIVELPVVEWRWPPQIPGSVTVIILCRLLQWPTDGRQSDTELHLTFMKLHAIQREENRWEITAADGMNWGVYIHAEEVQVGVLTMSWSSVLRVSALRSVITSGFRAVSVFEVPGSVRSTLGATLRPDHALYSTTMQATPNASHISAFNLRIVSPSAYRVCPLQNDTDTYLGIPADVAAVLPVDVVTDPNILLGMQTTVHIAELVKACHPSPDVVSAVGEHLNWLNKLLLPLKESTQLQGSESYKECLALLGRVHAAMKMVRIGLVVPQLQYRMYGSLINQMAQVAQNYDREFKQFKLFIIQNQILGSYLLQQNRAFAERELQMESFHAAVISQRREELDNTFAKMDRLSGQMEAESSAMEQAKKEMDEGLRQFQNRQVANALFAVLSAVAQIGLAFLTAGATAPGAVASAGQAVSIAGQAAQGLRRVVEILEQLEAVMEVVAAVKDLVDSLEQVGQIVDAPVMPELPSEADWSIFVNEVEAVAEGMPTEVSEVPVWRAKCKNVAALGREMSITAVQMSELQYDIWVQGMMRDMARSQADRLAAIQPADLTNYLEMATQMDMRTTRMLLGLLNILRIQNAALRYEYLLMPTELTTWPLGMDTVGDLLIAQENAALIGLMQLGPSSDFTSRHVVKDIPVNLLLDGEDWEFEIPVQAGMSSFPSSWSRVRIRHLEMHFVKEASGIGGEIIHQPTTQTGTVYILLQGSTIFHDRRRDQVLPFQAAAPLNYHYAYRLDTGDSTLTNEPSEQFANKFMQMTPFTRWRLRLSASAKENAGLAFPTATALDSTTQIVITFHVTAIRQIDWRHDEE

SEQ ID NO: 254 - protein, 867 aa, Artificial Sequence
  Synthetic
MALVDYGKLFEDLNQISMGVLDRVEFSEVMVIHRMYVRLADLNVGQLEGAEKVKRFYIFSDIIELPVVEWRWPPQIPGSVTVIILCRLLQWPTDGRQSDTELHLTFMKLHAIQREENRWEITAADGMNWGVYIHAEEVQVGVLTMSWSSVLRVSALRSVITSGFRAVSVFEVPGSVRSTLGATLRPDHALYSTTMQATPNASHISAFNLRIVSPSAYRVCPLQNDTDTYLGIPADVAAVLPVDVVTDPNILLGMQTTVHIAELVKACHPSPDVVSAVGEHLNWLNKLLLPLKESTQLQGSESYKECLALLGRVHAAMKMVRIGLVVPQLQYRMYGSLINQMAQVAQNYDREFKQFKLFIIQNQILGSYLLQQNRAFAERELQMESFHAAVISQRREELDNTFAKMDRLSGQMEAESSAMEQAKKEMDEGLRQFQNRQVANALFAVLSAVAQIGLAFLTAGATAPGAVASAGQAVSIAGQAAQGLRRVVEILEQLEAVMEVVAAVKDLVDSLEQVGQIVDAPVMPELPSEADWSIFVNEVEAVAEGMPTEVSEVPVWRAKCKNVAALGREMSITAVQMSELQYDIWVQGMMRDMARSQADRLAAIQPADLTNYLEMATQMDMRTTRMLLGLLNILRIQNAALRYEYLLMPTELTTWPLGMDTVGDLLIAQENAALIGLMQLGPSSDFTSRHVVKDIPVNLLLDGEDWEFEIPVQAGMSSFPSSWSRVRIRHLEMHFVKEASGIGGEIIHQPTTQTGTVYILLQGSTIFHDRRRDQVLPFQAAAPLNYHYAYRLDTGDSTLTNEPSEQFANKFMQMTPFTRWRLRLSASAKENAGLAFPTATALDSTTQIVITFHVTAIRQIDWRHDEE

SEQ ID NO: 255 - protein, 867 aa, Artificial Sequence
  Synthetic
MALVDYGKLFEDLNQISMGVLDRVEFSEVMVIHRMYVRLADLNVGQLEGAEKVKRFYVFSDIVELPVVEWRWPPQIPGSVTVIILCRLLQWPTDGRQSDTELHLTFMKLHAIQREENRWEITAADGMNWGVYIHAEEVQVGVLTMSWSSVLRVSALRSVITSGFRAVSVFEVPGSVRSTLGATLRPDHALYSTTMQATPNASHISAFNLRIVSPSAYRVCPLQNDTDTYLGIPADVAAVLPVDVVTDPNILLGMQTTVHIAELVKACHPSPDVVSAVGEHLNWLNKLLLPLKESTQLQGSESYKECLALLGRVHAAMKMVRIGLVVPQLQYRMYGSLINQMAQVAQNYDREFKQFKLFIIQNQILGSYLLQQNRAFAERELQMESFHAAVISQRREELDNTFAKMDRLSGQMEAESSAMEQAKKEMDEGLRQFQNRQVANALFAVLSAVAQIGLAFLTAGATAPGAVASAGQAVSIAGQAAQGLRRVVEILEQLEAVMEVVAAVKDLVDSLEQVGQIVDAPVMPELPSEADWSIFVNEVEAVAEGMPTEVSEVPVWRAKCKNVAALGREMSITAVQMSELQYDIWVQGMMRDMARSQADRLAAIQPADLTNYLEMATQMDMRTTRMLLGLLNILRIQNAALRYEYLLMPTELTTWPLGMDTVGDLLIAQENAALIGLMQLGPSSDFTSRHVVKDIPVNLLLDGEDWEFEIPVQAGMSSFPSSWSRVRIRHLEMHFVKEASGIGGEIIHQPTTQTGTVYILLQGSTIFHDRRRDQVLPFQAAAPLNYHYAYRLDTGDSTLTNEPSEQFANKFMQMTPFTRWRLRLSASAKENAGLAFPTATALDSTTQIVITFHVTAIRQIDWRHDEE

SEQ ID NO: 256 - protein, 867 aa, Artificial Sequence
  Synthetic
MALVDYGKLFEDLNQISMGVLDRVEFSEVMVIHRMYVRLADLNVGQLEGAEKVKRLVILGDIIVVPVVEWRWPPQIPGSVTVIILCRLLQWPTDGRQSDTELHLTFMKLHAIQREENRWEITAADGMNWGVYIHAEEVQVGVLTMSWSSVLRVSALRSVITSGFRAVSVFEVPGSVRSTLGATLRPDHALYSTTMQATPNASHISAFNLRIVSPSAYRVCPLQNDTDTYLGIPADVAAVLPVDVVTDPNILLGMQTTVHIAELVKACHPSPDVVSAVGEHLNWLNKLLLPLKESTQLQGSESYKECLALLGRVHAAMKMVRIGLVVPQLQYRMYGSLINQMAQVAQNYDREFKQFKLFIIQNQILGSYLLQQNRAFAERELQMESFHAAVISQRREELDNTFAKMDRLSGQMEAESSAMEQAKKEMDEGLRQFQNRQVANALFAVLSAVAQIGLAFLTAGATAPGAVASAGQAVSIAGQAAQGLRRVVEILEQLEAVMEVVAAVKDLVDSLEQVGQIVDAPVMPELPSEADWSIFVNEVEAVAEGMPTEVSEVPVWRAKCKNVAALGREMSITAVQMSELQYDIWVQGMMRDMARSQADRLAAIQPADLTNYLEMATQMDMRTTRMLLGLLNILRIQNAALRYEYLLMPTELTTWPLGMDTVGDLLIAQENAALIGLMQLGPSSDFTSRHVVKDIPVNLLLDGEDWEFEIPVQAGMSSFPSSWSRVRIRHLEMHFVKEASGIGGEIIHQPTTQTGTVYILLQGSTIFHDRRRDQVLPFQAAAPLNYHYAYRLDTGDSTLTNEPSEQFANKFMQMTPFTRWRLRLSASAKENAGLAFPTATALDSTTQIVITFHVTAIRQIDWRHDEE

SEQ ID NO: 257 - protein, 867 aa, Artificial Sequence
  Synthetic
MALVDYGKLFEDLNQISMGVLDRVEFSEVMVIHRMYVRLADLNVGQLEGAEKVKRLYIFADIIELPVVEWRWPPQIPGSVTVIILCRLLQWPTDGRQSDTELHLTFMKLHAIQREENRWEITAADGMNWGVYIHAEEVQVGVLTMSWSSVLRVSALRSVITSGFRAVSVFEVPGSVRSTLGATLRPDHALYSTTMQATPNASHISAFNLRIVSPSAYRVCPLQNDTDTYLGIPADVAAVLPVDVVTDPNILLGMQTTVHIAELVKACHPSPDVVSAVGEHLNWLNKLLLPLKESTQLQGSESYKECLALLGRVHAAMKMVRIGLVVPQLQYRMYGSLINQMAQVAQNYDREFKQFKLFIIQNQILGSYLLQQNRAFAERELQMESFHAAVISQRREELDNTFAKMDRLSGQMEAESSAMEQAKKEMDEGLRQFQNRQVANALFAVLSAVAQIGLAFLTAGATAPGAVASAGQAVSIAGQAAQGLRRVVEILEQLEAVMEVVAAVKDLVDSLEQVGQIVDAPVMPELPSEADWSIFVNEVEAVAEGMPTEVSEVPVWRAKCKNVAALGREMSITAVQMSELQYDIWVQGMMRDMARSQADRLAAIQPADLTNYLEMATQMDMRTTRMLLGLLNILRIQNAALRYEYLLMPTELTTWPLGMDTVGDLLIAQENAALIGLMQLGPSSDFTSRHVVKDIPVNLLLDGEDWEFEIPVQAGMSSFPSSWSRVRIRHLEMHFVKEASGIGGEIIHQPTTQTGTVYILLQGSTIFHDRRRDQVLPFQAAAPLNYHYAYRLDTGDSTLTNEPSEQFANKFMQMTPFTRWRLRLSASAKENAGLAFPTATALDSTTQIVITFHVTAIRQIDWRHDEE

SEQ ID NO: 258 - protein, 867 aa, Artificial Sequence
  Synthetic
MALVDYGKLFEDLNQISMGVLDRVEFSEVMVIHRMYVRLADLNVGQLEGAEKVKRLYIFCDIIVLPVVEWRWPPQIPGSVTVIILCRLLQWPTDGRQSDTELHLTFMKLHAIQREENRWEITAADGMNWGVYIHAEEVQVGVLTMSWSSVLRVSALRSVITSGFRAVSVFEVPGSVRSTLGATLRPDHALYSTTMQATPNASHISAFNLRIVSPSAYRVCPLQNDTDTYLGIPADVAAVLPVDVVTDPNILLGMQTTVHIAELVKACHPSPDVVSAVGEHLNWLNKLLLPLKESTQLQGSESYKECLALLGRVHAAMKMVRIGLVVPQLQYRMYGSLINQMAQVAQNYDREFKQFKLFIIQNQILGSYLLQQNRAFAERELQMESFHAAVISQRREELDNTFAKMDRLSGQMEAESSAMEQAKKEMDEGLRQFQNRQVANALFAVLSAVAQIGLAFLTAGATAPGAVASAGQAVSIAGQAAQGLRRVVEILEQLEAVMEVVAAVKDLVDSLEQVGQIVDAPVMPELPSEADWSIFVNEVEAVAEGMPTEVSEVPVWRAKCKNVAALGREMSITAVQMSELQYDIWVQGMMRDMARSQADRLAAIQPADLTNYLEMATQMDMRTTRMLLGLLNILRIQNAALRYEYLLMPTELTTWPLGMDTVGDLLIAQENAALIGLMQLGPSSDFTSRHVVKDIPVNLLLDGEDWEFEIPVQAGMSSFPSSWSRVRIRHLEMHFVKEASGIGGEIIHQPTTQTGTVYILLQGSTIFHDRRRDQVLPFQAAAPLNYHYAYRLDTGDSTLTNEPSEQFANKFMQMTPFTRWRLRLSASAKENAGLAFPTATALDSTTQIVITFHVTAIRQIDWRHDEE

SEQ ID NO: 259 - protein, 867 aa, Artificial Sequence
  Synthetic
MALVDYGKLFEDLNQISMGVLDRVEFSEVMVIHRMYVRLADLNVGQLEGAEKVKRLYIFCDIVELPVVEWRWPPQIPGSVTVIILCRLLQWPTDGRQSDTELHLTFMKLHAIQREENRWEITAADGMNWGVYIHAEEVQVGVLTMSWSSVLRVSALRSVITSGFRAVSVFEVPGSVRSTLGATLRPDHALYSTTMQATPNASHISAFNLRIVSPSAYRVCPLQNDTDTYLGIPADVAAVLPVDVVTDPNILLGMQTTVHIAELVKACHPSPDVVSAVGEHLNWLNKLLLPLKESTQLQGSESYKECLALLGRVHAAMKMVRIGLVVPQLQYRMYGSLINQMAQVAQNYDREFKQFKLFIIQNQILGSYLLQQNRAFAERELQMESFHAAVISQRREELDNTFAKMDRLSGQMEAESSAMEQAKKEMDEGLRQFQNRQVANALFAVLSAVAQIGLAFLTAGATAPGAVASAGQAVSIAGQAAQGLRRVVEILEQLEAVMEVVAAVKDLVDSLEQVGQIVDAPVMPELPSEADWSIFVNEVEAVAEGMPTEVSEVPVWRAKCKNVAALGREMSITAVQMSELQYDIWVQGMMRDMARSQADRLAAIQPADLTNYLEMATQMDMRTTRMLLGLLNILRIQNAALRYEYLLMPTELTTWPLGMDTVGDLLIAQENAALIGLMQLGPSSDFTSRHVVKDIPVNLLLDGEDWEFEIPVQAGMSSFPSSWSRVRIRHLEMHFVKEASGIGGEIIHQPTTQTGTVYILLQGSTIFHDRRRDQVLPFQAAAPLNYHYAYRLDTGDSTLTNEPSEQFANKFMQMTPFTRWRLRLSASAKENAGLAFPTATALDSTTQIVITFHVTAIRQIDWRHDEE

SEQ ID NO: 260 - protein, 867 aa, Artificial Sequence
  Synthetic
MALVDYGKLFEDLNQISMGVLDRVEFSEVMVIHRMYVRLADLNVGQLEGAEKVKRLYIFGDIIELPVVEWRWPAQIPGSVTVIILCRLLQWPTDGRQSDTELHLTFMKLHAIQREENRWEITAADGMNWGVYIHAEEVQVGVLTMSWSSVLRVSALRSVITSGFRAVSVFEVPGSVRSTLGATLRPDHALYSTTMQATPNASHISAFNLRIVSPSAYRVCPLQNDTDTYLGIPADVAAVLPVDVVTDPNILLGMQTTVHIAELVKACHPSPDVVSAVGEHLNWLNKLLLPLKESTQLQGSESYKECLALLGRVHAAMKMVRIGLVVPQLQYRMYGSLINQMAQVAQNYDREFKQFKLFIIQNQILGSYLLQQNRAFAERELQMESFHAAVISQRREELDNTFAKMDRLSGQMEAESSAMEQAKKEMDEGLRQFQNRQVANALFAVLSAVAQIGLAFLTAGATAPGAVASAGQAVSIAGQAAQGLRRVVEILEQLEAVMEVVAAVKDLVDSLEQVGQIVDAPVMPELPSEADWSIFVNEVEAVAEGMPTEVSEVPVWRAKCKNVAALGREMSITAVQMSELQYDIWVQGMMRDMARSQADRLAAIQPADLTNYLEMATQMDMRTTRMLLGLLNILRIQNAALRYEYLLMPTELTTWPLGMDTVGDLLIAQENAALIGLMQLGPSSDFTSRHVVKDIPVNLLLDGEDWEFEIPVQAGMSSFPSSWSRVRIRHLEMHFVKEASGIGGEIIHQPTTQTGTVYILLQGSTIFHDRRRDQVLPFQAAAPLNYHYAYRLDTGDSTLTNEPSEQFANKFMQMTPFTRWRLRLSASAKENAGLAFPTATALDSTTQIVITFHVTAIRQIDWRHDEE

SEQ ID NO: 261 - protein, 867 aa, Artificial Sequence
  Synthetic
MALVDYGKLFEDLNQISMGVLDRVEFSEVMVIHRMYVRLADLNVGQLEGAEKVKRLYIFGDVIELPVVEWRWPPQIPGSVTVIILCRLLQWPTDGRQSDTELHLTFMKLHAIQREENRWEITAADGMNWGVYIHAEEVQVGVLTMSWSSVLRVSALRSVITSGFRAVSVFEVPGSVRSTLGATLRPDHALYSTTMQATPNASHISAFNLRIVSPSAYRVCPLQNDTDTYLGIPADVAAVLPVDVVTDPNILLGMQTTVHIAELVKACHPSPDVVSAVGEHLNWLNKLLLPLKESTQLQGSESYKECLALLGRVHAAMKMVRIGLVVPQLQYRMYGSLINQMAQVAQNYDREFKQFKLFIIQNQILGSYLLQQNRAFAERELQMESFHAAVISQRREELDNTFAKMDRLSGQMEAESSAMEQAKKEMDEGLRQFQNRQVANALFAVLSAVAQIGLAFLTAGATAPGAVASAGQAVSIAGQAAQGLRRVVEILEQLEAVMEVVAAVKDLVDSLEQVGQIVDAPVMPELPSEADWSIFVNEVEAVAEGMPTEVSEVPVWRAKCKNVAALGREMSITAVQMSELQYDIWVQGMMRDMARSQADRLAAIQPADLTNYLEMATQMDMRTTRMLLGLLNILRIQNAALRYEYLLMPTELTTWPLGMDTVGDLLIAQENAALIGLMQLGPSSDFTSRHVVKDIPVNLLLDGEDWEFEIPVQAGMSSFPSSWSRVRIRHLEMHFVKEASGIGGEIIHQPTTQTGTVYILLQGSTIFHDRRRDQVLPFQAAAPLNYHYAYRLDTGDSTLTNEPSEQFANKFMQMTPFTRWRLRLSASAKENAGLAFPTATALDSTTQIVITFHVTAIRQIDWRHDEE

SEQ ID NO: 262 - protein, 867 aa, Artificial Sequence
  Synthetic
MALVDYGKLFEDLNQISMGVLDRVEFSEVMVIHRMYVRLADLNVGQLEGAEKVKRLYIFSDIIVLPVVEWRWPPQIPGSVTVIILCRLLQWPTDGRQSDTELHLTFMKLHAIQREENRWEITAADGMNWGVYIHAEEVQVGVLTMSWSSVLRVSALRSVITSGFRAVSVFEVPGSVRSTLGATLRPDHALYSTTMQATPNASHISAFNLRIVSPSAYRVCPLQNDTDTYLGIPADVAAVLPVDVVTDPNILLGMQTTVHIAELVKACHPSPDVVSAVGEHLNWLNKLLLPLKESTQLQGSESYKECLALLGRVHAAMKMVRIGLVVPQLQYRMYGSLINQMAQVAQNYDREFKQFKLFIIQNQILGSYLLQQNRAFAERELQMESFHAAVISQRREELDNTFAKMDRLSGQMEAESSAMEQAKKEMDEGLRQFQNRQVANALFAVLSAVAQIGLAFLTAGATAPGAVASAGQAVSIAGQAAQGLRRVVEILEQLEAVMEVVAAVKDLVDSLEQVGQIVDAPVMPELPSEADWSIFVNEVEAVAEGMPTEVSEVPVWRAKCKNVAALGREMSITAVQMSELQYDIWVQGMMRDMARSQADRLAAIQPADLTNYLEMATQMDMRTTRMLLGLLNILRIQNAALRYEYLLMPTELTTWPLGMDTVGDLLIAQENAALIGLMQLGPSSDFTSRHVVKDIPVNLLLDGEDWEFEIPVQAGMSSFPSSWSRVRIRHLEMHFVKEASGIGGEIIHQPTTQTGTVYILLQGSTIFHDRRRDQVLPFQAAAPLNYHYAYRLDTGDSTLTNEPSEQFANKFMQMTPFTRWRLRLSASAKENAGLAFPTATALDSTTQIVITFHVTAIRQIDWRHDEE

SEQ ID NO: 263 - protein, 867 aa, Artificial Sequence
  Synthetic
MALVDYGKLFEDLNQISMGVLDRVEFSEVMVIHRMYVRLADLNVGQLEGAEKVKRLYIFSDILELPVVEWRWPPQIPGSVTVIILCRLLQWPTDGRQSDTELHLTFMKLHAIQREENRWEITAADGMNWGVYIHAEEVQVGVLTMSWSSVLRVSALRSVITSGFRAVSVFEVPGSVRSTLGATLRPDHALYSTTMQATPNASHISAFNLRIVSPSAYRVCPLQNDTDTYLGIPADVAAVLPVDVVTDPNILLGMQTTVHIAELVKACHPSPDVVSAVGEHLNWLNKLLLPLKESTQLQGSESYKECLALLGRVHAAMKMVRIGLVVPQLQYRMYGSLINQMAQVAQNYDREFKQFKLFIIQNQILGSYLLQQNRAFAERELQMESFHAAVISQRREELDNTFAKMDRLSGQMEAESSAMEQAKKEMDEGLRQFQNRQVANALFAVLSAVAQIGLAFLTAGATAPGAVASAGQAVSIAGQAAQGLRRVVEILEQLEAVMEVVAAVKDLVDSLEQVGQIVDAPVMPELPSEADWSIFVNEVEAVAEGMPTEVSEVPVWRAKCKNVAALGREMSITAVQMSELQYDIWVQGMMRDMARSQADRLAAIQPADLTNYLEMATQMDMRTTRMLLGLLNILRIQNAALRYEYLLMPTELTTWPLGMDTVGDLLIAQENAALIGLMQLGPSSDFTSRHVVKDIPVNLLLDGEDWEFEIPVQAGMSSFPSSWSRVRIRHLEMHFVKEASGIGGEIIHQPTTQTGTVYILLQGSTIFHDRRRDQVLPFQAAAPLNYHYAYRLDTGDSTLTNEPSEQFANKFMQMTPFTRWRLRLSASAKENAGLAFPTATALDSTTQIVITFHVTAIRQIDWRHDEE

SEQ ID NO: 264 - protein, 867 aa, Artificial Sequence
  Synthetic
MALVDYGKLFEDLNQISMGVLDRVEFSEVMVIHRMYVRLADLNVGQLEGAEKVKRLYIFSDVIVLPVVEWRWPPQIPGSVTVIILCRLLQWPTDGRQSDTELHLTFMKLHAIQREENRWEITAADGMNWGVYIHAEEVQVGVLTMSWSSVLRVSALRSVITSGFRAVSVFEVPGSVRSTLGATLRPDHALYSTTMQATPNASHISAFNLRIVSPSAYRVCPLQNDTDTYLGIPADVAAVLPVDVVTDPNILLGMQTTVHIAELVKACHPSPDVVSAVGEHLNWLNKLLLPLKESTQLQGSESYKECLALLGRVHAAMKMVRIGLVVPQLQYRMYGSLINQMAQVAQNYDREFKQFKLFIIQNQILGSYLLQQNRAFAERELQMESFHAAVISQRREELDNTFAKMDRLSGQMEAESSAMEQAKKEMDEGLRQFQNRQVANALFAVLSAVAQIGLAFLTAGATAPGAVASAGQAVSIAGQAAQGLRRVVEILEQLEAVMEVVAAVKDLVDSLEQVGQIVDAPVMPELPSEADWSIFVNEVEAVAEGMPTEVSEVPVWRAKCKNVAALGREMSITAVQMSELQYDIWVQGMMRDMARSQADRLAAIQPADLTNYLEMATQMDMRTTRMLLGLLNILRIQNAALRYEYLLMPTELTTWPLGMDTVGDLLIAQENAALIGLMQLGPSSDFTSRHVVKDIPVNLLLDGEDWEFEIPVQAGMSSFPSSWSRVRIRHLEMHFVKEASGIGGEIIHQPTTQTGTVYILLQGSTIFHDRRRDQVLPFQAAAPLNYHYAYRLDTGDSTLTNEPSEQFANKFMQMTPFTRWRLRLSASAKENAGLAFPTATALDSTTQIVITFHVTAIRQIDWRHDEE

SEQ ID NO: 265 - protein, 867 aa, Artificial Sequence
  Synthetic
MALVDYGKLFEDLNQISMGVLDRVEFSEVMVIHRMYVRLADLNVGQLEGAEKVKRLYIFTDVIELPVVEWRWPPQIPGSVTVIILCRLLQWPTDGRQSDTELHLTFMKLHAIQREENRWEITAADGMNWGVYIHAEEVQVGVLTMSWSSVLRVSALRSVITSGFRAVSVFEVPGSVRSTLGATLRPDHALYSTTMQATPNASHISAFNLRIVSPSAYRVCPLQNDTDTYLGIPADVAAVLPVDVVTDPNILLGMQTTVHIAELVKACHPSPDVVSAVGEHLNWLNKLLLPLKESTQLQGSESYKECLALLGRVHAAMKMVRIGLVVPQLQYRMYGSLINQMAQVAQNYDREFKQFKLFIIQNQILGSYLLQQNRAFAERELQMESFHAAVISQRREELDNTFAKMDRLSGQMEAESSAMEQAKKEMDEGLRQFQNRQVANALFAVLSAVAQIGLAFLTAGATAPGAVASAGQAVSIAGQAAQGLRRVVEILEQLEAVMEVVAAVKDLVDSLEQVGQIVDAPVMPELPSEADWSIFVNEVEAVAEGMPTEVSEVPVWRAKCKNVAALGREMSITAVQMSELQYDIWVQGMMRDMARSQADRLAAIQPADLTNYLEMATQMDMRTTRMLLGLLNILRIQNAALRYEYLLMPTELTTWPLGMDTVGDLLIAQENAALIGLMQLGPSSDFTSRHVVKDIPVNLLLDGEDWEFEIPVQAGMSSFPSSWSRVRIRHLEMHFVKEASGIGGEIIHQPTTQTGTVYILLQGSTIFHDRRRDQVLPFQAAAPLNYHYAYRLDTGDSTLTNEPSEQFANKFMQMTPFTRWRLRLSASAKENAGLAFPTATALDSTTQIVITFHVTAIRQIDWRHDEE

SEQ ID NO: 266 - protein, 867 aa, Artificial Sequence
  Synthetic
MALVDYGKLFEDLNQISMGVLDRVEFSEVMVIHRMYVRLADLNVGQLEGAEKVKRLYVFCDIIELPVVEWRWPPQIPGSVTVIILCRLLQWPTDGRQSDTELHLTFMKLHAIQREENRWEITAADGMNWGVYIHAEEVQVGVLTMSWSSVLRVSALRSVITSGFRAVSVFEVPGSVRSTLGATLRPDHALYSTTMQATPNASHISAFNLRIVSPSAYRVCPLQNDTDTYLGIPADVAAVLPVDVVTDPNILLGMQTTVHIAELVKACHPSPDVVSAVGEHLNWLNKLLLPLKESTQLQGSESYKECLALLGRVHAAMKMVRIGLVVPQLQYRMYGSLINQMAQVAQNYDREFKQFKLFIIQNQILGSYLLQQNRAFAERELQMESFHAAVISQRREELDNTFAKMDRLSGQMEAESSAMEQAKKEMDEGLRQFQNRQVANALFAVLSAVAQIGLAFLTAGATAPGAVASAGQAVSIAGQAAQGLRRVVEILEQLEAVMEVVAAVKDLVDSLEQVGQIVDAPVMPELPSEADWSIFVNEVEAVAEGMPTEVSEVPVWRAKCKNVAALGREMSITAVQMSELQYDIWVQGMMRDMARSQADRLAAIQPADLTNYLEMATQMDMRTTRMLLGLLNILRIQNAALRYEYLLMPTELTTWPLGMDTVGDLLIAQENAALIGLMQLGPSSDFTSRHVVKDIPVNLLLDGEDWEFEIPVQAGMSSFPSSWSRVRIRHLEMHFVKEASGIGGEIIHQPTTQTGTVYILLQGSTIFHDRRRDQVLPFQAAAPLNYHYAYRLDTGDSTLTNEPSEQFANKFMQMTPFTRWRLRLSASAKENAGLAFPTATALDSTTQIVITFHVTAIRQIDWRHDEE

SEQ ID NO: 267 - protein, 867 aa, Artificial Sequence
  Synthetic
MALVDYGKLFEDLNQISMGVLDRVEFSEVMVIHRMYVRLADLNVGQLEGAEKVKRLYVFCDIIVLPVVEWRWPPQIPGSVTVIILCRLLQWPTDGRQSDTELHLTFMKLHAIQREENRWEITAADGMNWGVYIHAEEVQVGVLTMSWSSVLRVSALRSVITSGFRAVSVFEVPGSVRSTLGATLRPDHALYSTTMQATPNASHISAFNLRIVSPSAYRVCPLQNDTDTYLGIPADVAAVLPVDVVTDPNILLGMQTTVHIAELVKACHPSPDVVSAVGEHLNWLNKLLLPLKESTQLQGSESYKECLALLGRVHAAMKMVRIGLVVPQLQYRMYGSLINQMAQVAQNYDREFKQFKLFIIQNQILGSYLLQQNRAFAERELQMESFHAAVISQRREELDNTFAKMDRLSGQMEAESSAMEQAKKEMDEGLRQFQNRQVANALFAVLSAVAQIGLAFLTAGATAPGAVASAGQAVSIAGQAAQGLRRVVEILEQLEAVMEVVAAVKDLVDSLEQVGQIVDAPVMPELPSEADWSIFVNEVEAVAEGMPTEVSEVPVWRAKCKNVAALGREMSITAVQMSELQYDIWVQGMMRDMARSQADRLAAIQPADLTNYLEMATQMDMRTTRMLLGLLNILRIQNAALRYEYLLMPTELTTWPLGMDTVGDLLIAQENAALIGLMQLGPSSDFTSRHVVKDIPVNLLLDGEDWEFEIPVQAGMSSFPSSWSRVRIRHLEMHFVKEASGIGGEIIHQPTTQTGTVYILLQGSTIFHDRRRDQVLPFQAAAPLNYHYAYRLDTGDSTLTNEPSEQFANKFMQMTPFTRWRLRLSASAKENAGLAFPTATALDSTTQIVITFHVTAIRQIDWRHDEE

SEQ ID NO: 268 - protein, 867 aa, Artificial Sequence
  Synthetic
MALVDYGKLFEDLNQISMGVLDRVEFSEVMVIHRMYVRLADLNVGQLEGAEKVKRLYVFGDIVELPVVEWRWPPQIPGSVTVIILCRLLQWPTDGRQSDTELHLTFMKLHAIQREENRWEITAADGMNWGVYIHAEEVQVGVLTMSWSSVLRVSALRSVITSGFRAVSVFEVPGSVRSTLGATLRPDHALYSTTMQATPNASHISAFNLRIVSPSAYRVCPLQNDTDTYLGIPADVAAVLPVDVVTDPNILLGMQTTVHIAELVKACHPSPDVVSAVGEHLNWLNKLLLPLKESTQLQGSESYKECLALLGRVHAAMKMVRIGLVVPQLQYRMYGSLINQMAQVAQNYDREFKQFKLFIIQNQILGSYLLQQNRAFAERELQMESFHAAVISQRREELDNTFAKMDRLSGQMEAESSAMEQAKKEMDEGLRQFQNRQVANALFAVLSAVAQIGLAFLTAGATAPGAVASAGQAVSIAGQAAQGLRRVVEILEQLEAVMEVVAAVKDLVDSLEQVGQIVDAPVMPELPSEADWSIFVNEVEAVAEGMPTEVSEVPVWRAKCKNVAALGREMSITAVQMSELQYDIWVQGMMRDMARSQADRLAAIQPADLTNYLEMATQMDMRTTRMLLGLLNILRIQNAALRYEYLLMPTELTTWPLGMDTVGDLLIAQENAALIGLMQLGPSSDFTSRHVVKDIPVNLLLDGEDWEFEIPVQAGMSSFPSSWSRVRIRHLEMHFVKEASGIGGEIIHQPTTQTGTVYILLQGSTIFHDRRRDQVLPFQAAAPLNYHYAYRLDTGDSTLTNEPSEQFANKFMQMTPFTRWRLRLSASAKENAGLAFPTATALDSTTQIVITFHVTAIRQIDWRHDEE

SEQ ID NO: 269 - protein, 867 aa, Artificial Sequence
  Synthetic
MALVDYGKLFEDLNQISMGVLDRVEFSEVMVIHRMYVRLADLNVGQLEGAEKVKRLYVFGDVVELPVVEWRWPPQIPGSVTVIILCRLLQWPTDGRQSDTELHLTFMKLHAIQREENRWEITAADGMNWGVYIHAEEVQVGVLTMSWSSVLRVSALRSVITSGFRAVSVFEVPGSVRSTLGATLRPDHALYSTTMQATPNASHISAFNLRIVSPSAYRVCPLQNDTDTYLGIPADVAAVLPVDVVTDPNILLGMQTTVHIAELVKACHPSPDVVSAVGEHLNWLNKLLLPLKESTQLQGSESYKECLALLGRVHAAMKMVRIGLVVPQLQYRMYGSLINQMAQVAQNYDREFKQFKLFIIQNQILGSYLLQQNRAFAERELQMESFHAAVISQRREELDNTFAKMDRLSGQMEAESSAMEQAKKEMDEGLRQFQNRQVANALFAVLSAVAQIGLAFLTAGATAPGAVASAGQAVSIAGQAAQGLRRVVEILEQLEAVMEVVAAVKDLVDSLEQVGQIVDAPVMPELPSEADWSIFVNEVEAVAEGMPTEVSEVPVWRAKCKNVAALGREMSITAVQMSELQYDIWVQGMMRDMARSQADRLAAIQPADLTNYLEMATQMDMRTTRMLLGLLNILRIQNAALRYEYLLMPTELTTWPLGMDTVGDLLIAQENAALIGLMQLGPSSDFTSRHVVKDIPVNLLLDGEDWEFEIPVQAGMSSFPSSWSRVRIRHLEMHFVKEASGIGGEIIHQPTTQTGTVYILLQGSTIFHDRRRDQVLPFQAAAPLNYHYAYRLDTGDSTLTNEPSEQFANKFMQMTPFTRWRLRLSASAKENAGLAFPTATALDSTTQIVITFHVTAIRQIDWRHDEE

SEQ ID NO: 270 - protein, 867 aa, Artificial Sequence
  Synthetic
MALVDYGKLFEDLNQISMGVLDRVEFSEVMVIHRMYVRLADLNVGQLEGAEKVKRLYVFSDIIELPVVEWRWPPQIPGSVTVIILCRLLQWPTDGRQSDTELHLTFMKLHAIQREENRWEITAADGMNWGVYIHAEEVQVGVLTMSWSSVLRVSALRSVITSGFRAVSVFEVPGSVRSTLGATLRPDHALYSTTMQATPNASHISAFNLRIVSPSAYRVCPLQNDTDTYLGIPADVAAVLPVDVVTDPNILLGMQTTVHIAELVKACHPSPDVVSAVGEHLNWLNKLLLPLKESTQLQGSESYKECLALLGRVHAAMKMVRIGLVVPQLQYRMYGSLINQMAQVAQNYDREFKQFKLFIIQNQILGSYLLQQNRAFAERELQMESFHAAVISQRREELDNTFAKMDRLSGQMEAESSAMEQAKKEMDEGLRQFQNRQVANALFAVLSAVAQIGLAFLTAGATAPGAVASAGQAVSIAGQAAQGLRRVVEILEQLEAVMEVVAAVKDLVDSLEQVGQIVDAPVMPELPSEADWSIFVNEVEAVAEGMPTEVSEVPVWRAKCKNVAALGREMSITAVQMSELQYDIWVQGMMRDMARSQADRLAAIQPADLTNYLEMATQMDMRTTRMLLGLLNILRIQNAALRYEYLLMPTELTTWPLGMDTVGDLLIAQENAALIGLMQLGPSSDFTSRHVVKDIPVNLLLDGEDWEFEIPVQAGMSSFPSSWSRVRIRHLEMHFVKEASGIGGEIIHQPTTQTGTVYILLQGSTIFHDRRRDQVLPFQAAAPLNYHYAYRLDTGDSTLTNEPSEQFANKFMQMTPFTRWRLRLSASAKENAGLAFPTATALDSTTQIVITFHVTAIRQIDWRHDEE

SEQ ID NO: 271 - protein, 867 aa, Artificial Sequence
  Synthetic
MALVDYGKLFEDLNQISMGVLDRVEFSEVMVIHRMYVRLADLNVGQLEGAEKVKRLYVFSDIVELPVVEWRWPPQIPGSVTVIILCRLLQWPTDGRQSDTELHLTFMKLHAIQREENRWEITAADGMNWGVYIHAEEVQVGVLTMSWSSVLRVSALRSVITSGFRAVSVFEVPGSVRSTLGATLRPDHALYSTTMQATPNASHISAFNLRIVSPSAYRVCPLQNDTDTYLGIPADVAAVLPVDVVTDPNILLGMQTTVHIAELVKACHPSPDVVSAVGEHLNWLNKLLLPLKESTQLQGSESYKECLALLGRVHAAMKMVRIGLVVPQLQYRMYGSLINQMAQVAQNYDREFKQFKLFIIQNQILGSYLLQQNRAFAERELQMESFHAAVISQRREELDNTFAKMDRLSGQMEAESSAMEQAKKEMDEGLRQFQNRQVANALFAVLSAVAQIGLAFLTAGATAPGAVASAGQAVSIAGQAAQGLRRVVEILEQLEAVMEVVAAVKDLVDSLEQVGQIVDAPVMPELPSEADWSIFVNEVEAVAEGMPTEVSEVPVWRAKCKNVAALGREMSITAVQMSELQYDIWVQGMMRDMARSQADRLAAIQPADLTNYLEMATQMDMRTTRMLLGLLNILRIQNAALRYEYLLMPTELTTWPLGMDTVGDLLIAQENAALIGLMQLGPSSDFTSRHVVKDIPVNLLLDGEDWEFEIPVQAGMSSFPSSWSRVRIRHLEMHFVKEASGIGGEIIHQPTTQTGTVYILLQGSTIFHDRRRDQVLPFQAAAPLNYHYAYRLDTGDSTLTNEPSEQFANKFMQMTPFTRWRLRLSASAKENAGLAFPTATALDSTTQIVITFHVTAIRQIDWRHDEE

SEQ ID NO: 272 - protein, 867 aa, Artificial Sequence
  Synthetic
MALVDYGKLFEDLNQISMGVLDRVEFSEVMVIHRMYVRLADLNVGQLEGAEKVKRLYVFSDVIELPVVEWRWPPQIPGSVTVIILCRLLQWPTDGRQSDTELHLTFMKLHAIQREENRWEITAADGMNWGVYIHAEEVQVGVLTMSWSSVLRVSALRSVITSGFRAVSVFEVPGSVRSTLGATLRPDHALYSTTMQATPNASHISAFNLRIVSPSAYRVCPLQNDTDTYLGIPADVAAVLPVDVVTDPNILLGMQTTVHIAELVKACHPSPDVVSAVGEHLNWLNKLLLPLKESTQLQGSESYKECLALLGRVHAAMKMVRIGLVVPQLQYRMYGSLINQMAQVAQNYDREFKQFKLFIIQNQILGSYLLQQNRAFAERELQMESFHAAVISQRREELDNTFAKMDRLSGQMEAESSAMEQAKKEMDEGLRQFQNRQVANALFAVLSAVAQIGLAFLTAGATAPGAVASAGQAVSIAGQAAQGLRRVVEILEQLEAVMEVVAAVKDLVDSLEQVGQIVDAPVMPELPSEADWSIFVNEVEAVAEGMPTEVSEVPVWRAKCKNVAALGREMSITAVQMSELQYDIWVQGMMRDMARSQADRLAAIQPADLTNYLEMATQMDMRTTRMLLGLLNILRIQNAALRYEYLLMPTELTTWPLGMDTVGDLLIAQENAALIGLMQLGPSSDFTSRHVVKDIPVNLLLDGEDWEFEIPVQAGMSSFPSSWSRVRIRHLEMHFVKEASGIGGEIIHQPTTQTGTVYILLQGSTIFHDRRRDQVLPFQAAAPLNYHYAYRLDTGDSTLTNEPSEQFANKFMQMTPFTRWRLRLSASAKENAGLAFPTATALDSTTQIVITFHVTAIRQIDWRHDEE

SEQ ID NO: 273 - protein, 867 aa, Artificial Sequence
  Synthetic
MALVDYGKLFEDLNQISMGVLDRVEFSEVMVIHRMYVRLADLNVGQLEGAEKVKRLYVFTDVIVLPVVEWRWPPQIPGSVTVIILCRLLQWPTDGRQSDTELHLTFMKLHAIQREENRWEITAADGMNWGVYIHAEEVQVGVLTMSWSSVLRVSALRSVITSGFRAVSVFEVPGSVRSTLGATLRPDHALYSTTMQATPNASHISAFNLRIVSPSAYRVCPLQNDTDTYLGIPADVAAVLPVDVVTDPNILLGMQTTVHIAELVKACHPSPDVVSAVGEHLNWLNKLLLPLKESTQLQGSESYKECLALLGRVHAAMKMVRIGLVVPQLQYRMYGSLINQMAQVAQNYDREFKQFKLFIIQNQILGSYLLQQNRAFAERELQMESFHAAVISQRREELDNTFAKMDRLSGQMEAESSAMEQAKKEMDEGLRQFQNRQVANALFAVLSAVAQIGLAFLTAGATAPGAVASAGQAVSIAGQAAQGLRRVVEILEQLEAVMEVVAAVKDLVDSLEQVGQIVDAPVMPELPSEADWSIFVNEVEAVAEGMPTEVSEVPVWRAKCKNVAALGREMSITAVQMSELQYDIWVQGMMRDMARSQADRLAAIQPADLTNYLEMATQMDMRTTRMLLGLLNILRIQNAALRYEYLLMPTELTTWPLGMDTVGDLLIAQENAALIGLMQLGPSSDFTSRHVVKDIPVNLLLDGEDWEFEIPVQAGMSSFPSSWSRVRIRHLEMHFVKEASGIGGEIIHQPTTQTGTVYILLQGSTIFHDRRRDQVLPFQAAAPLNYHYAYRLDTGDSTLTNEPSEQFANKFMQMTPFTRWRLRLSASAKENAGLAFPTATALDSTTQIVITFHVTAIRQIDWRHDEE

SEQ ID NO: 274 - protein, 867 aa, Artificial Sequence
  Synthetic
MALVDYGKLFEDLNQISMGVLDRVEFSEVMVIHRMYVRLADLNVGQLEGAEKVKRLYVFTDVVVLPVVEWRWPPQIPGSVTVIILCRLLQWPTDGRQSDTELHLTFMKLHAIQREENRWEITAADGMNWGVYIHAEEVQVGVLTMSWSSVLRVSALRSVITSGFRAVSVFEVPGSVRSTLGATLRPDHALYSTTMQATPNASHISAFNLRIVSPSAYRVCPLQNDTDTYLGIPADVAAVLPVDVVTDPNILLGMQTTVHIAELVKACHPSPDVVSAVGEHLNWLNKLLLPLKESTQLQGSESYKECLALLGRVHAAMKMVRIGLVVPQLQYRMYGSLINQMAQVAQNYDREFKQFKLFIIQNQILGSYLLQQNRAFAERELQMESFHAAVISQRREELDNTFAKMDRLSGQMEAESSAMEQAKKEMDEGLRQFQNRQVANALFAVLSAVAQIGLAFLTAGATAPGAVASAGQAVSIAGQAAQGLRRVVEILEQLEAVMEVVAAVKDLVDSLEQVGQIVDAPVMPELPSEADWSIFVNEVEAVAEGMPTEVSEVPVWRAKCKNVAALGREMSITAVQMSELQYDIWVQGMMRDMARSQADRLAAIQPADLTNYLEMATQMDMRTTRMLLGLLNILRIQNAALRYEYLLMPTELTTWPLGMDTVGDLLIAQENAALIGLMQLGPSSDFTSRHVVKDIPVNLLLDGEDWEFEIPVQAGMSSFPSSWSRVRIRHLEMHFVKEASGIGGEIIHQPTTQTGTVYILLQGSTIFHDRRRDQVLPFQAAAPLNYHYAYRLDTGDSTLTNEPSEQFANKFMQMTPFTRWRLRLSASAKENAGLAFPTATALDSTTQIVITFHVTAIRQIDWRHDEE

SEQ ID NO: 275 - protein, 867 aa, Artificial Sequence
  Synthetic
MALVDYGKLFEDLNQISMGVLDRVEFSEVMVIHRMYVRLADLNVGQLEGAEKVMHLYIFADVIELPVVEWRWPPQIPGSVTVIILCRLLQWPTDGRQSDTELHLTFMKLHAIQREENRWEITAADGMNWGVYIHAEEVQVGVLTMSWSSVLRVSALRSVITSGFRAVSVFEVPGSVRSTLGATLRPDHALYSTTMQATPNASHISAFNLRIVSPSAYRVCPLQNDTDTYLGIPADVAAVLPVDVVTDPNILLGMQTTVHIAELVKACHPSPDVVSAVGEHLNWLNKLLLPLKESTQLQGSESYKECLALLGRVHAAMKMVRIGLVVPQLQYRMYGSLINQMAQVAQNYDREFKQFKLFIIQNQILGSYLLQQNRAFAERELQMESFHAAVISQRREELDNTFAKMDRLSGQMEAESSAMEQAKKEMDEGLRQFQNRQVANALFAVLSAVAQIGLAFLTAGATAPGAVASAGQAVSIAGQAAQGLRRVVEILEQLEAVMEVVAAVKDLVDSLEQVGQIVDAPVMPELPSEADWSIFVNEVEAVAEGMPTEVSEVPVWRAKCKNVAALGREMSITAVQMSELQYDIWVQGMMRDMARSQADRLAAIQPADLTNYLEMATQMDMRTTRMLLGLLNILRIQNAALRYEYLLMPTELTTWPLGMDTVGDLLIAQENAALIGLMQLGPSSDFTSRHVVKDIPVNLLLDGEDWEFEIPVQAGMSSFPSSWSRVRIRHLEMHFVKEASGIGGEIIHQPTTQTGTVYILLQGSTIFHDRRRDQVLPFQAAAPLNYHYAYRLDTGDSTLTNEPSEQFANKFMQMTPFTRWRLRLSASAKENAGLAFPTATALDSTTQIVITFHVTAIRQIDWRHDEE

SEQ ID NO: 276 - protein, 867 aa, Artificial Sequence
  Synthetic
MALVDYGKLFEDLNQISMGVLDRVEFSEVMVIHRMYVRLADLNVGQLEGAEKVMQLYIFCDILELPVVEWRWPTQIPGSVTVIILCRLLQWPTDGRQSDTELHLTFMKLHAIQREENRWEITAADGMNWGVYIHAEEVQVGVLTMSWSSVLRVSALRSVITSGFRAVSVFEVPGSVRSTLGATLRPDHALYSTTMQATPNASHISAFNLRIVSPSAYRVCPLQNDTDTYLGIPADVAAVLPVDVVTDPNILLGMQTTVHIAELVKACHPSPDVVSAVGEHLNWLNKLLLPLKESTQLQGSESYKECLALLGRVHAAMKMVRIGLVVPQLQYRMYGSLINQMAQVAQNYDREFKQFKLFIIQNQILGSYLLQQNRAFAERELQMESFHAAVISQRREELDNTFAKMDRLSGQMEAESSAMEQAKKEMDEGLRQFQNRQVANALFAVLSAVAQIGLAFLTAGATAPGAVASAGQAVSIAGQAAQGLRRVVEILEQLEAVMEVVAAVKDLVDSLEQVGQIVDAPVMPELPSEADWSIFVNEVEAVAEGMPTEVSEVPVWRAKCKNVAALGREMSITAVQMSELQYDIWVQGMMRDMARSQADRLAAIQPADLTNYLEMATQMDMRTTRMLLGLLNILRIQNAALRYEYLLMPTELTTWPLGMDTVGDLLIAQENAALIGLMQLGPSSDFTSRHVVKDIPVNLLLDGEDWEFEIPVQAGMSSFPSSWSRVRIRHLEMHFVKEASGIGGEIIHQPTTQTGTVYILLQGSTIFHDRRRDQVLPFQAAAPLNYHYAYRLDTGDSTLTNEPSEQFANKFMQMTPFTRWRLRLSASAKENAGLAFPTATALDSTTQIVITFHVTAIRQIDWRHDEE

SEQ ID NO: 277 - protein, 867 aa, Artificial Sequence
  Synthetic
MALVDYGKLFEDLNQISMGVLDRVEFSEVMVIHRMYVRLADLNVGQLEGAEKVMRLYIFADVVVLPVVEWRWPPQIPGSVTVIILCRLLQWPTDGRQSDTELHLTFMKLHAIQREENRWEITAADGMNWGVYIHAEEVQVGVLTMSWSSVLRVSALRSVITSGFRAVSVFEVPGSVRSTLGATLRPDHALYSTTMQATPNASHISAFNLRIVSPSAYRVCPLQNDTDTYLGIPADVAAVLPVDVVTDPNILLGMQTTVHIAELVKACHPSPDVVSAVGEHLNWLNKLLLPLKESTQLQGSESYKECLALLGRVHAAMKMVRIGLVVPQLQYRMYGSLINQMAQVAQNYDREFKQFKLFIIQNQILGSYLLQQNRAFAERELQMESFHAAVISQRREELDNTFAKMDRLSGQMEAESSAMEQAKKEMDEGLRQFQNRQVANALFAVLSAVAQIGLAFLTAGATAPGAVASAGQAVSIAGQAAQGLRRVVEILEQLEAVMEVVAAVKDLVDSLEQVGQIVDAPVMPELPSEADWSIFVNEVEAVAEGMPTEVSEVPVWRAKCKNVAALGREMSITAVQMSELQYDIWVQGMMRDMARSQADRLAAIQPADLTNYLEMATQMDMRTTRMLLGLLNILRIQNAALRYEYLLMPTELTTWPLGMDTVGDLLIAQENAALIGLMQLGPSSDFTSRHVVKDIPVNLLLDGEDWEFEIPVQAGMSSFPSSWSRVRIRHLEMHFVKEASGIGGEIIHQPTTQTGTVYILLQGSTIFHDRRRDQVLPFQAAAPLNYHYAYRLDTGDSTLTNEPSEQFANKFMQMTPFTRWRLRLSASAKENAGLAFPTATALDSTTQIVITFHVTAIRQIDWRHDEE

SEQ ID NO: 278 - protein, 867 aa, Artificial Sequence
  Synthetic
MALVDYGKLFEDLNQISMGVLDRVEFSEVMVIHRMYVRLADLNVGQLEGAEKVMRLYIFCDVIELPVVEWRWPPQIPGSVTVIILCRLLQWPTDGRQSDTELHLTFMKLHAIQREENRWEITAADGMNWGVYIHAEEVQVGVLTMSWSSVLRVSALRSVITSGFRAVSVFEVPGSVRSTLGATLRPDHALYSTTMQATPNASHISAFNLRIVSPSAYRVCPLQNDTDTYLGIPADVAAVLPVDVVTDPNILLGMQTTVHIAELVKACHPSPDVVSAVGEHLNWLNKLLLPLKESTQLQGSESYKECLALLGRVHAAMKMVRIGLVVPQLQYRMYGSLINQMAQVAQNYDREFKQFKLFIIQNQILGSYLLQQNRAFAERELQMESFHAAVISQRREELDNTFAKMDRLSGQMEAESSAMEQAKKEMDEGLRQFQNRQVANALFAVLSAVAQIGLAFLTAGATAPGAVASAGQAVSIAGQAAQGLRRVVEILEQLEAVMEVVAAVKDLVDSLEQVGQIVDAPVMPELPSEADWSIFVNEVEAVAEGMPTEVSEVPVWRAKCKNVAALGREMSITAVQMSELQYDIWVQGMMRDMARSQADRLAAIQPADLTNYLEMATQMDMRTTRMLLGLLNILRIQNAALRYEYLLMPTELTTWPLGMDTVGDLLIAQENAALIGLMQLGPSSDFTSRHVVKDIPVNLLLDGEDWEFEIPVQAGMSSFPSSWSRVRIRHLEMHFVKEASGIGGEIIHQPTTQTGTVYILLQGSTIFHDRRRDQVLPFQAAAPLNYHYAYRLDTGDSTLTNEPSEQFANKFMQMTPFTRWRLRLSASAKENAGLAFPTATALDSTTQIVITFHVTAIRQIDWRHDEE

SEQ ID NO: 279 - protein, 867 aa, Artificial Sequence
  Synthetic
MALVDYGKLFEDLNQISMGVLDRVEFSEVMVIHRMYVRLADLNVGQLEGAEKVMRLYVFCDIIELPVVEWRWPPQIPGSVTVIILCRLLQWPTDGRQSDTELHLTFMKLHAIQREENRWEITAADGMNWGVYIHAEEVQVGVLTMSWSSVLRVSALRSVITSGFRAVSVFEVPGSVRSTLGATLRPDHALYSTTMQATPNASHISAFNLRIVSPSAYRVCPLQNDTDTYLGIPADVAAVLPVDVVTDPNILLGMQTTVHIAELVKACHPSPDVVSAVGEHLNWLNKLLLPLKESTQLQGSESYKECLALLGRVHAAMKMVRIGLVVPQLQYRMYGSLINQMAQVAQNYDREFKQFKLFIIQNQILGSYLLQQNRAFAERELQMESFHAAVISQRREELDNTFAKMDRLSGQMEAESSAMEQAKKEMDEGLRQFQNRQVANALFAVLSAVAQIGLAFLTAGATAPGAVASAGQAVSIAGQAAQGLRRVVEILEQLEAVMEVVAAVKDLVDSLEQVGQIVDAPVMPELPSEADWSIFVNEVEAVAEGMPTEVSEVPVWRAKCKNVAALGREMSITAVQMSELQYDIWVQGMMRDMARSQADRLAAIQPADLTNYLEMATQMDMRTTRMLLGLLNILRIQNAALRYEYLLMPTELTTWPLGMDTVGDLLIAQENAALIGLMQLGPSSDFTSRHVVKDIPVNLLLDGEDWEFEIPVQAGMSSFPSSWSRVRIRHLEMHFVKEASGIGGEIIHQPTTQTGTVYILLQGSTIFHDRRRDQVLPFQAAAPLNYHYAYRLDTGDSTLTNEPSEQFANKFMQMTPFTRWRLRLSASAKENAGLAFPTATALDSTTQIVITFHVTAIRQIDWRHDEE

SEQ ID NO: 280 - protein, 867 aa, Artificial Sequence
  Synthetic
MALVDYGKLFEDLNQISMGVLDRVEFSEVMVIHRMYVRLADLNVGQLEGAEKVMRLYVFCDILVLPVVEWRWPPQIPGSVTVIILCRLLQWPTDGRQSDTELHLTFMKLHAIQREENRWEITAADGMNWGVYIHAEEVQVGVLTMSWSSVLRVSALRSVITSGFRAVSVFEVPGSVRSTLGATLRPDHALYSTTMQATPNASHISAFNLRIVSPSAYRVCPLQNDTDTYLGIPADVAAVLPVDVVTDPNILLGMQTTVHIAELVKACHPSPDVVSAVGEHLNWLNKLLLPLKESTQLQGSESYKECLALLGRVHAAMKMVRIGLVVPQLQYRMYGSLINQMAQVAQNYDREFKQFKLFIIQNQILGSYLLQQNRAFAERELQMESFHAAVISQRREELDNTFAKMDRLSGQMEAESSAMEQAKKEMDEGLRQFQNRQVANALFAVLSAVAQIGLAFLTAGATAPGAVASAGQAVSIAGQAAQGLRRVVEILEQLEAVMEVVAAVKDLVDSLEQVGQIVDAPVMPELPSEADWSIFVNEVEAVAEGMPTEVSEVPVWRAKCKNVAALGREMSITAVQMSELQYDIWVQGMMRDMARSQADRLAAIQPADLTNYLEMATQMDMRTTRMLLGLLNILRIQNAALRYEYLLMPTELTTWPLGMDTVGDLLIAQENAALIGLMQLGPSSDFTSRHVVKDIPVNLLLDGEDWEFEIPVQAGMSSFPSSWSRVRIRHLEMHFVKEASGIGGEIIHQPTTQTGTVYILLQGSTIFHDRRRDQVLPFQAAAPLNYHYAYRLDTGDSTLTNEPSEQFANKFMQMTPFTRWRLRLSASAKENAGLAFPTATALDSTTQIVITFHVTAIRQIDWRHDEE

SEQ ID NO: 281 - protein, 867 aa, Artificial Sequence
  Synthetic
MALVDYGKLFEDLNQISMGVLDRVEFSEVMVIHRMYVRLADLNVGQLEGAEKVMRLYVFSDIIVLPVVEWRWPPQIPGSVTVIILCRLLQWPTDGRQSDTELHLTFMKLHAIQREENRWEITAADGMNWGVYIHAEEVQVGVLTMSWSSVLRVSALRSVITSGFRAVSVFEVPGSVRSTLGATLRPDHALYSTTMQATPNASHISAFNLRIVSPSAYRVCPLQNDTDTYLGIPADVAAVLPVDVVTDPNILLGMQTTVHIAELVKACHPSPDVVSAVGEHLNWLNKLLLPLKESTQLQGSESYKECLALLGRVHAAMKMVRIGLVVPQLQYRMYGSLINQMAQVAQNYDREFKQFKLFIIQNQILGSYLLQQNRAFAERELQMESFHAAVISQRREELDNTFAKMDRLSGQMEAESSAMEQAKKEMDEGLRQFQNRQVANALFAVLSAVAQIGLAFLTAGATAPGAVASAGQAVSIAGQAAQGLRRVVEILEQLEAVMEVVAAVKDLVDSLEQVGQIVDAPVMPELPSEADWSIFVNEVEAVAEGMPTEVSEVPVWRAKCKNVAALGREMSITAVQMSELQYDIWVQGMMRDMARSQADRLAAIQPADLTNYLEMATQMDMRTTRMLLGLLNILRIQNAALRYEYLLMPTELTTWPLGMDTVGDLLIAQENAALIGLMQLGPSSDFTSRHVVKDIPVNLLLDGEDWEFEIPVQAGMSSFPSSWSRVRIRHLEMHFVKEASGIGGEIIHQPTTQTGTVYILLQGSTIFHDRRRDQVLPFQAAAPLNYHYAYRLDTGDSTLTNEPSEQFANKFMQMTPFTRWRLRLSASAKENAGLAFPTATALDSTTQIVITFHVTAIRQIDWRHDEE

SEQ ID NO: 282 - protein, 867 aa, Artificial Sequence
  Synthetic
MALVDYGKLFEDLNQISMGVLDRVEFSEVMVIHRMYVRLADLNVGQLEGAEKVRHLYIFADIIELPVVEWRWPPQIPGSVTVIILCRLLQWPTDGRQSDTELHLTFMKLHAIQREENRWEITAADGMNWGVYIHAEEVQVGVLTMSWSSVLRVSALRSVITSGFRAVSVFEVPGSVRSTLGATLRPDHALYSTTMQATPNASHISAFNLRIVSPSAYRVCPLQNDTDTYLGIPADVAAVLPVDVVTDPNILLGMQTTVHIAELVKACHPSPDVVSAVGEHLNWLNKLLLPLKESTQLQGSESYKECLALLGRVHAAMKMVRIGLVVPQLQYRMYGSLINQMAQVAQNYDREFKQFKLFIIQNQILGSYLLQQNRAFAERELQMESFHAAVISQRREELDNTFAKMDRLSGQMEAESSAMEQAKKEMDEGLRQFQNRQVANALFAVLSAVAQIGLAFLTAGATAPGAVASAGQAVSIAGQAAQGLRRVVEILEQLEAVMEVVAAVKDLVDSLEQVGQIVDAPVMPELPSEADWSIFVNEVEAVAEGMPTEVSEVPVWRAKCKNVAALGREMSITAVQMSELQYDIWVQGMMRDMARSQADRLAAIQPADLTNYLEMATQMDMRTTRMLLGLLNILRIQNAALRYEYLLMPTELTTWPLGMDTVGDLLIAQENAALIGLMQLGPSSDFTSRHVVKDIPVNLLLDGEDWEFEIPVQAGMSSFPSSWSRVRIRHLEMHFVKEASGIGGEIIHQPTTQTGTVYILLQGSTIFHDRRRDQVLPFQAAAPLNYHYAYRLDTGDSTLTNEPSEQFANKFMQMTPFTRWRLRLSASAKENAGLAFPTATALDSTTQIVITFHVTAIRQIDWRHDEE

SEQ ID NO: 283 - protein, 867 aa, Artificial Sequence
  Synthetic
MALVDYGKLFEDLNQISMGVLDRVEFSEVMVIHRMYVRLADLNVGQLEGAEKVRHLYIFADVVELPVVEWRWPPQIPGSVTVIILCRLLQWPTDGRQSDTELHLTFMKLHAIQREENRWEITAADGMNWGVYIHAEEVQVGVLTMSWSSVLRVSALRSVITSGFRAVSVFEVPGSVRSTLGATLRPDHALYSTTMQATPNASHISAFNLRIVSPSAYRVCPLQNDTDTYLGIPADVAAVLPVDVVTDPNILLGMQTTVHIAELVKACHPSPDVVSAVGEHLNWLNKLLLPLKESTQLQGSESYKECLALLGRVHAAMKMVRIGLVVPQLQYRMYGSLINQMAQVAQNYDREFKQFKLFIIQNQILGSYLLQQNRAFAERELQMESFHAAVISQRREELDNTFAKMDRLSGQMEAESSAMEQAKKEMDEGLRQFQNRQVANALFAVLSAVAQIGLAFLTAGATAPGAVASAGQAVSIAGQAAQGLRRVVEILEQLEAVMEVVAAVKDLVDSLEQVGQIVDAPVMPELPSEADWSIFVNEVEAVAEGMPTEVSEVPVWRAKCKNVAALGREMSITAVQMSELQYDIWVQGMMRDMARSQADRLAAIQPADLTNYLEMATQMDMRTTRMLLGLLNILRIQNAALRYEYLLMPTELTTWPLGMDTVGDLLIAQENAALIGLMQLGPSSDFTSRHVVKDIPVNLLLDGEDWEFEIPVQAGMSSFPSSWSRVRIRHLEMHFVKEASGIGGEIIHQPTTQTGTVYILLQGSTIFHDRRRDQVLPFQAAAPLNYHYAYRLDTGDSTLTNEPSEQFANKFMQMTPFTRWRLRLSASAKENAGLAFPTATALDSTTQIVITFHVTAIRQIDWRHDEE

SEQ ID NO: 284 - protein, 867 aa, Artificial Sequence
  Synthetic
MALVDYGKLFEDLNQISMGVLDRVEFSEVMVIHRMYVRLADLNVGQLEGAEKVRHLYIFCDVIELPVVEWRWPPQIPGSVTVIILCRLLQWPTDGRQSDTELHLTFMKLHAIQREENRWEITAADGMNWGVYIHAEEVQVGVLTMSWSSVLRVSALRSVITSGFRAVSVFEVPGSVRSTLGATLRPDHALYSTTMQATPNASHISAFNLRIVSPSAYRVCPLQNDTDTYLGIPADVAAVLPVDVVTDPNILLGMQTTVHIAELVKACHPSPDVVSAVGEHLNWLNKLLLPLKESTQLQGSESYKECLALLGRVHAAMKMVRIGLVVPQLQYRMYGSLINQMAQVAQNYDREFKQFKLFIIQNQILGSYLLQQNRAFAERELQMESFHAAVISQRREELDNTFAKMDRLSGQMEAESSAMEQAKKEMDEGLRQFQNRQVANALFAVLSAVAQIGLAFLTAGATAPGAVASAGQAVSIAGQAAQGLRRVVEILEQLEAVMEVVAAVKDLVDSLEQVGQIVDAPVMPELPSEADWSIFVNEVEAVAEGMPTEVSEVPVWRAKCKNVAALGREMSITAVQMSELQYDIWVQGMMRDMARSQADRLAAIQPADLTNYLEMATQMDMRTTRMLLGLLNILRIQNAALRYEYLLMPTELTTWPLGMDTVGDLLIAQENAALIGLMQLGPSSDFTSRHVVKDIPVNLLLDGEDWEFEIPVQAGMSSFPSSWSRVRIRHLEMHFVKEASGIGGEIIHQPTTQTGTVYILLQGSTIFHDRRRDQVLPFQAAAPLNYHYAYRLDTGDSTLTNEPSEQFANKFMQMTPFTRWRLRLSASAKENAGLAFPTATALDSTTQIVITFHVTAIRQIDWRHDEE

SEQ ID NO: 285 - protein, 867 aa, Artificial Sequence
  Synthetic
MALVDYGKLFEDLNQISMGVLDRVEFSEVMVIHRMYVRLADLNVGQLEGAEKVRHLYIFSDVIELPVVEWRWPPQIPGSVTVIILCRLLQWPTDGRQSDTELHLTFMKLHAIQREENRWEITAADGMNWGVYIHAEEVQVGVLTMSWSSVLRVSALRSVITSGFRAVSVFEVPGSVRSTLGATLRPDHALYSTTMQATPNASHISAFNLRIVSPSAYRVCPLQNDTDTYLGIPADVAAVLPVDVVTDPNILLGMQTTVHIAELVKACHPSPDVVSAVGEHLNWLNKLLLPLKESTQLQGSESYKECLALLGRVHAAMKMVRIGLVVPQLQYRMYGSLINQMAQVAQNYDREFKQFKLFIIQNQILGSYLLQQNRAFAERELQMESFHAAVISQRREELDNTFAKMDRLSGQMEAESSAMEQAKKEMDEGLRQFQNRQVANALFAVLSAVAQIGLAFLTAGATAPGAVASAGQAVSIAGQAAQGLRRVVEILEQLEAVMEVVAAVKDLVDSLEQVGQIVDAPVMPELPSEADWSIFVNEVEAVAEGMPTEVSEVPVWRAKCKNVAALGREMSITAVQMSELQYDIWVQGMMRDMARSQADRLAAIQPADLTNYLEMATQMDMRTTRMLLGLLNILRIQNAALRYEYLLMPTELTTWPLGMDTVGDLLIAQENAALIGLMQLGPSSDFTSRHVVKDIPVNLLLDGEDWEFEIPVQAGMSSFPSSWSRVRIRHLEMHFVKEASGIGGEIIHQPTTQTGTVYILLQGSTIFHDRRRDQVLPFQAAAPLNYHYAYRLDTGDSTLTNEPSEQFANKFMQMTPFTRWRLRLSASAKENAGLAFPTATALDSTTQIVITFHVTAIRQIDWRHDEE

SEQ ID NO: 286 - protein, 867 aa, Artificial Sequence
  Synthetic
MALVDYGKLFEDLNQISMGVLDRVEFSEVMVIHRMYVRLADLNVGQLEGAEKVRHLYIFSDVVELPVVEWRWPPQIPGSVTVIILCRLLQWPTDGRQSDTELHLTFMKLHAIQREENRWEITAADGMNWGVYIHAEEVQVGVLTMSWSSVLRVSALRSVITSGFRAVSVFEVPGSVRSTLGATLRPDHALYSTTMQATPNASHISAFNLRIVSPSAYRVCPLQNDTDTYLGIPADVAAVLPVDVVTDPNILLGMQTTVHIAELVKACHPSPDVVSAVGEHLNWLNKLLLPLKESTQLQGSESYKECLALLGRVHAAMKMVRIGLVVPQLQYRMYGSLINQMAQVAQNYDREFKQFKLFIIQNQILGSYLLQQNRAFAERELQMESFHAAVISQRREELDNTFAKMDRLSGQMEAESSAMEQAKKEMDEGLRQFQNRQVANALFAVLSAVAQIGLAFLTAGATAPGAVASAGQAVSIAGQAAQGLRRVVEILEQLEAVMEVVAAVKDLVDSLEQVGQIVDAPVMPELPSEADWSIFVNEVEAVAEGMPTEVSEVPVWRAKCKNVAALGREMSITAVQMSELQYDIWVQGMMRDMARSQADRLAAIQPADLTNYLEMATQMDMRTTRMLLGLLNILRIQNAALRYEYLLMPTELTTWPLGMDTVGDLLIAQENAALIGLMQLGPSSDFTSRHVVKDIPVNLLLDGEDWEFEIPVQAGMSSFPSSWSRVRIRHLEMHFVKEASGIGGEIIHQPTTQTGTVYILLQGSTIFHDRRRDQVLPFQAAAPLNYHYAYRLDTGDSTLTNEPSEQFANKFMQMTPFTRWRLRLSASAKENAGLAFPTATALDSTTQIVITFHVTAIRQIDWRHDEE

SEQ ID NO: 287 - protein, 867 aa, Artificial Sequence
  Synthetic
MALVDYGKLFEDLNQISMGVLDRVEFSEVMVIHRMYVRLADLNVGQLEGAEKVRHLYVFTDVLELPVVEWRWPPQIPGSVTVIILCRLLQWPTDGRQSDTELHLTFMKLHAIQREENRWEITAADGMNWGVYIHAEEVQVGVLTMSWSSVLRVSALRSVITSGFRAVSVFEVPGSVRSTLGATLRPDHALYSTTMQATPNASHISAFNLRIVSPSAYRVCPLQNDTDTYLGIPADVAAVLPVDVVTDPNILLGMQTTVHIAELVKACHPSPDVVSAVGEHLNWLNKLLLPLKESTQLQGSESYKECLALLGRVHAAMKMVRIGLVVPQLQYRMYGSLINQMAQVAQNYDREFKQFKLFIIQNQILGSYLLQQNRAFAERELQMESFHAAVISQRREELDNTFAKMDRLSGQMEAESSAMEQAKKEMDEGLRQFQNRQVANALFAVLSAVAQIGLAFLTAGATAPGAVASAGQAVSIAGQAAQGLRRVVEILEQLEAVMEVVAAVKDLVDSLEQVGQIVDAPVMPELPSEADWSIFVNEVEAVAEGMPTEVSEVPVWRAKCKNVAALGREMSITAVQMSELQYDIWVQGMMRDMARSQADRLAAIQPADLTNYLEMATQMDMRTTRMLLGLLNILRIQNAALRYEYLLMPTELTTWPLGMDTVGDLLIAQENAALIGLMQLGPSSDFTSRHVVKDIPVNLLLDGEDWEFEIPVQAGMSSFPSSWSRVRIRHLEMHFVKEASGIGGEIIHQPTTQTGTVYILLQGSTIFHDRRRDQVLPFQAAAPLNYHYAYRLDTGDSTLTNEPSEQFANKFMQMTPFTRWRLRLSASAKENAGLAFPTATALDSTTQIVITFHVTAIRQIDWRHDEE

SEQ ID NO: 288 - protein, 867 aa, Artificial Sequence
  Synthetic
MALVDYGKLFEDLNQISMGVLDRVEFSEVMVIHRMYVRLADLNVGQLEGAEKVRQLYIFCDVIVLPVVEWRWPPQIPGSVTVIILCRLLQWPTDGRQSDTELHLTFMKLHAIQREENRWEITAADGMNWGVYIHAEEVQVGVLTMSWSSVLRVSALRSVITSGFRAVSVFEVPGSVRSTLGATLRPDHALYSTTMQATPNASHISAFNLRIVSPSAYRVCPLQNDTDTYLGIPADVAAVLPVDVVTDPNILLGMQTTVHIAELVKACHPSPDVVSAVGEHLNWLNKLLLPLKESTQLQGSESYKECLALLGRVHAAMKMVRIGLVVPQLQYRMYGSLINQMAQVAQNYDREFKQFKLFIIQNQILGSYLLQQNRAFAERELQMESFHAAVISQRREELDNTFAKMDRLSGQMEAESSAMEQAKKEMDEGLRQFQNRQVANALFAVLSAVAQIGLAFLTAGATAPGAVASAGQAVSIAGQAAQGLRRVVEILEQLEAVMEVVAAVKDLVDSLEQVGQIVDAPVMPELPSEADWSIFVNEVEAVAEGMPTEVSEVPVWRAKCKNVAALGREMSITAVQMSELQYDIWVQGMMRDMARSQADRLAAIQPADLTNYLEMATQMDMRTTRMLLGLLNILRIQNAALRYEYLLMPTELTTWPLGMDTVGDLLIAQENAALIGLMQLGPSSDFTSRHVVKDIPVNLLLDGEDWEFEIPVQAGMSSFPSSWSRVRIRHLEMHFVKEASGIGGEIIHQPTTQTGTVYILLQGSTIFHDRRRDQVLPFQAAAPLNYHYAYRLDTGDSTLTNEPSEQFANKFMQMTPFTRWRLRLSASAKENAGLAFPTATALDSTTQIVITFHVTAIRQIDWRHDEE

SEQ ID NO: 289 - protein, 867 aa, Artificial Sequence
  Synthetic
MALVDYGKLFEDLNQISMGVLDRVEFSEVMVIHRMYVRLADLNVGQLEGAEKVRQLYIFSDVVVLPVVEWRWPPQIPGSVTVIILCRLLQWPTDGRQSDTELHLTFMKLHAIQREENRWEITAADGMNWGVYIHAEEVQVGVLTMSWSSVLRVSALRSVITSGFRAVSVFEVPGSVRSTLGATLRPDHALYSTTMQATPNASHISAFNLRIVSPSAYRVCPLQNDTDTYLGIPADVAAVLPVDVVTDPNILLGMQTTVHIAELVKACHPSPDVVSAVGEHLNWLNKLLLPLKESTQLQGSESYKECLALLGRVHAAMKMVRIGLVVPQLQYRMYGSLINQMAQVAQNYDREFKQFKLFIIQNQILGSYLLQQNRAFAERELQMESFHAAVISQRREELDNTFAKMDRLSGQMEAESSAMEQAKKEMDEGLRQFQNRQVANALFAVLSAVAQIGLAFLTAGATAPGAVASAGQAVSIAGQAAQGLRRVVEILEQLEAVMEVVAAVKDLVDSLEQVGQIVDAPVMPELPSEADWSIFVNEVEAVAEGMPTEVSEVPVWRAKCKNVAALGREMSITAVQMSELQYDIWVQGMMRDMARSQADRLAAIQPADLTNYLEMATQMDMRTTRMLLGLLNILRIQNAALRYEYLLMPTELTTWPLGMDTVGDLLIAQENAALIGLMQLGPSSDFTSRHVVKDIPVNLLLDGEDWEFEIPVQAGMSSFPSSWSRVRIRHLEMHFVKEASGIGGEIIHQPTTQTGTVYILLQGSTIFHDRRRDQVLPFQAAAPLNYHYAYRLDTGDSTLTNEPSEQFANKFMQMTPFTRWRLRLSASAKENAGLAFPTATALDSTTQIVITFHVTAIRQIDWRHDEE

SEQ ID NO: 290 - protein, 867 aa, Artificial Sequence
  Synthetic
MALVDYGKLFEDLNQISMGVLDRVEFSEVMVIHRMYVRLADLNVGQLEGAEKVRQLYVFCDVLVLPVVEWRWPPQIPGSVTVIILCRLLQWPTDGRQSDTELHLTFMKLHAIQREENRWEITAADGMNWGVYIHAEEVQVGVLTMSWSSVLRVSALRSVITSGFRAVSVFEVPGSVRSTLGATLRPDHALYSTTMQATPNASHISAFNLRIVSPSAYRVCPLQNDTDTYLGIPADVAAVLPVDVVTDPNILLGMQTTVHIAELVKACHPSPDVVSAVGEHLNWLNKLLLPLKESTQLQGSESYKECLALLGRVHAAMKMVRIGLVVPQLQYRMYGSLINQMAQVAQNYDREFKQFKLFIIQNQILGSYLLQQNRAFAERELQMESFHAAVISQRREELDNTFAKMDRLSGQMEAESSAMEQAKKEMDEGLRQFQNRQVANALFAVLSAVAQIGLAFLTAGATAPGAVASAGQAVSIAGQAAQGLRRVVEILEQLEAVMEVVAAVKDLVDSLEQVGQIVDAPVMPELPSEADWSIFVNEVEAVAEGMPTEVSEVPVWRAKCKNVAALGREMSITAVQMSELQYDIWVQGMMRDMARSQADRLAAIQPADLTNYLEMATQMDMRTTRMLLGLLNILRIQNAALRYEYLLMPTELTTWPLGMDTVGDLLIAQENAALIGLMQLGPSSDFTSRHVVKDIPVNLLLDGEDWEFEIPVQAGMSSFPSSWSRVRIRHLEMHFVKEASGIGGEIIHQPTTQTGTVYILLQGSTIFHDRRRDQVLPFQAAAPLNYHYAYRLDTGDSTLTNEPSEQFANKFMQMTPFTRWRLRLSASAKENAGLAFPTATALDSTTQIVITFHVTAIRQIDWRHDEE

SEQ ID NO: 291 - protein, 867 aa, Artificial Sequence
  Synthetic
MALVDYGKLFEDLNQISMGVLDRVEFSEVMVIHRMYVRLADLNVGQLEGAEKVRRLYIFADILELPVVEWRWPPQIPGSVTVIILCRLLQWPTDGRQSDTELHLTFMKLHAIQREENRWEITAADGMNWGVYIHAEEVQVGVLTMSWSSVLRVSALRSVITSGFRAVSVFEVPGSVRSTLGATLRPDHALYSTTMQATPNASHISAFNLRIVSPSAYRVCPLQNDTDTYLGIPADVAAVLPVDVVTDPNILLGMQTTVHIAELVKACHPSPDVVSAVGEHLNWLNKLLLPLKESTQLQGSESYKECLALLGRVHAAMKMVRIGLVVPQLQYRMYGSLINQMAQVAQNYDREFKQFKLFIIQNQILGSYLLQQNRAFAERELQMESFHAAVISQRREELDNTFAKMDRLSGQMEAESSAMEQAKKEMDEGLRQFQNRQVANALFAVLSAVAQIGLAFLTAGATAPGAVASAGQAVSIAGQAAQGLRRVVEILEQLEAVMEVVAAVKDLVDSLEQVGQIVDAPVMPELPSEADWSIFVNEVEAVAEGMPTEVSEVPVWRAKCKNVAALGREMSITAVQMSELQYDIWVQGMMRDMARSQADRLAAIQPADLTNYLEMATQMDMRTTRMLLGLLNILRIQNAALRYEYLLMPTELTTWPLGMDTVGDLLIAQENAALIGLMQLGPSSDFTSRHVVKDIPVNLLLDGEDWEFEIPVQAGMSSFPSSWSRVRIRHLEMHFVKEASGIGGEIIHQPTTQTGTVYILLQGSTIFHDRRRDQVLPFQAAAPLNYHYAYRLDTGDSTLTNEPSEQFANKFMQMTPFTRWRLRLSASAKENAGLAFPTATALDSTTQIVITFHVTAIRQIDWRHDEE

SEQ ID NO: 292 - protein, 867 aa, Artificial Sequence
  Synthetic
MALVDYGKLFEDLNQISMGVLDRVEFSEVMVIHRMYVRLADLNVGQLEGAEKVRRLYIFADIVELPVVEWRWPAQIPGSVTVIILCRLLQWPTDGRQSDTELHLTFMKLHAIQREENRWEITAADGMNWGVYIHAEEVQVGVLTMSWSSVLRVSALRSVITSGFRAVSVFEVPGSVRSTLGATLRPDHALYSTTMQATPNASHISAFNLRIVSPSAYRVCPLQNDTDTYLGIPADVAAVLPVDVVTDPNILLGMQTTVHIAELVKACHPSPDVVSAVGEHLNWLNKLLLPLKESTQLQGSESYKECLALLGRVHAAMKMVRIGLVVPQLQYRMYGSLINQMAQVAQNYDREFKQFKLFIIQNQILGSYLLQQNRAFAERELQMESFHAAVISQRREELDNTFAKMDRLSGQMEAESSAMEQAKKEMDEGLRQFQNRQVANALFAVLSAVAQIGLAFLTAGATAPGAVASAGQAVSIAGQAAQGLRRVVEILEQLEAVMEVVAAVKDLVDSLEQVGQIVDAPVMPELPSEADWSIFVNEVEAVAEGMPTEVSEVPVWRAKCKNVAALGREMSITAVQMSELQYDIWVQGMMRDMARSQADRLAAIQPADLTNYLEMATQMDMRTTRMLLGLLNILRIQNAALRYEYLLMPTELTTWPLGMDTVGDLLIAQENAALIGLMQLGPSSDFTSRHVVKDIPVNLLLDGEDWEFEIPVQAGMSSFPSSWSRVRIRHLEMHFVKEASGIGGEIIHQPTTQTGTVYILLQGSTIFHDRRRDQVLPFQAAAPLNYHYAYRLDTGDSTLTNEPSEQFANKFMQMTPFTRWRLRLSASAKENAGLAFPTATALDSTTQIVITFHVTAIRQIDWRHDEE

SEQ ID NO: 293 - protein, 867 aa, Artificial Sequence
  Synthetic
MALVDYGKLFEDLNQISMGVLDRVEFSEVMVIHRMYVRLADLNVGQLEGAEKVRRLYIFGDIVELPVVEWRWPPQIPGSVTVIILCRLLQWPTDGRQSDTELHLTFMKLHAIQREENRWEITAADGMNWGVYIHAEEVQVGVLTMSWSSVLRVSALRSVITSGFRAVSVFEVPGSVRSTLGATLRPDHALYSTTMQATPNASHISAFNLRIVSPSAYRVCPLQNDTDTYLGIPADVAAVLPVDVVTDPNILLGMQTTVHIAELVKACHPSPDVVSAVGEHLNWLNKLLLPLKESTQLQGSESYKECLALLGRVHAAMKMVRIGLVVPQLQYRMYGSLINQMAQVAQNYDREFKQFKLFIIQNQILGSYLLQQNRAFAERELQMESFHAAVISQRREELDNTFAKMDRLSGQMEAESSAMEQAKKEMDEGLRQFQNRQVANALFAVLSAVAQIGLAFLTAGATAPGAVASAGQAVSIAGQAAQGLRRVVEILEQLEAVMEVVAAVKDLVDSLEQVGQIVDAPVMPELPSEADWSIFVNEVEAVAEGMPTEVSEVPVWRAKCKNVAALGREMSITAVQMSELQYDIWVQGMMRDMARSQADRLAAIQPADLTNYLEMATQMDMRTTRMLLGLLNILRIQNAALRYEYLLMPTELTTWPLGMDTVGDLLIAQENAALIGLMQLGPSSDFTSRHVVKDIPVNLLLDGEDWEFEIPVQAGMSSFPSSWSRVRIRHLEMHFVKEASGIGGEIIHQPTTQTGTVYILLQGSTIFHDRRRDQVLPFQAAAPLNYHYAYRLDTGDSTLTNEPSEQFANKFMQMTPFTRWRLRLSASAKENAGLAFPTATALDSTTQIVITFHVTAIRQIDWRHDEE

SEQ ID NO: 294 - protein, 867 aa, Artificial Sequence
  Synthetic
MALVDYGKLFEDLNQISMGVLDRVEFSEVMVIHRMYVRLADLNVGQLEGAEKVRRLYIFTDIIELPVVEWRWPPQIPGSVTVIILCRLLQWPTDGRQSDTELHLTFMKLHAIQREENRWEITAADGMNWGVYIHAEEVQVGVLTMSWSSVLRVSALRSVITSGFRAVSVFEVPGSVRSTLGATLRPDHALYSTTMQATPNASHISAFNLRIVSPSAYRVCPLQNDTDTYLGIPADVAAVLPVDVVTDPNILLGMQTTVHIAELVKACHPSPDVVSAVGEHLNWLNKLLLPLKESTQLQGSESYKECLALLGRVHAAMKMVRIGLVVPQLQYRMYGSLINQMAQVAQNYDREFKQFKLFIIQNQILGSYLLQQNRAFAERELQMESFHAAVISQRREELDNTFAKMDRLSGQMEAESSAMEQAKKEMDEGLRQFQNRQVANALFAVLSAVAQIGLAFLTAGATAPGAVASAGQAVSIAGQAAQGLRRVVEILEQLEAVMEVVAAVKDLVDSLEQVGQIVDAPVMPELPSEADWSIFVNEVEAVAEGMPTEVSEVPVWRAKCKNVAALGREMSITAVQMSELQYDIWVQGMMRDMARSQADRLAAIQPADLTNYLEMATQMDMRTTRMLLGLLNILRIQNAALRYEYLLMPTELTTWPLGMDTVGDLLIAQENAALIGLMQLGPSSDFTSRHVVKDIPVNLLLDGEDWEFEIPVQAGMSSFPSSWSRVRIRHLEMHFVKEASGIGGEIIHQPTTQTGTVYILLQGSTIFHDRRRDQVLPFQAAAPLNYHYAYRLDTGDSTLTNEPSEQFANKFMQMTPFTRWRLRLSASAKENAGLAFPTATALDSTTQIVITFHVTAIRQIDWRHDEE

SEQ ID NO: 295 - protein, 867 aa, Artificial Sequence
  Synthetic
MALVDYGKLFEDLNQISMGVLDRVEFSEVMVIHRMYVRLADLNVGQLEGAEKVRRLYVFADIIDLPVVEWRWPPQIPGSVTVIILCRLLQWPTDGRQSDTELHLTFMKLHAIQREENRWEITAADGMNWGVYIHAEEVQVGVLTMSWSSVLRVSALRSVITSGFRAVSVFEVPGSVRSTLGATLRPDHALYSTTMQATPNASHISAFNLRIVSPSAYRVCPLQNDTDTYLGIPADVAAVLPVDVVTDPNILLGMQTTVHIAELVKACHPSPDVVSAVGEHLNWLNKLLLPLKESTQLQGSESYKECLALLGRVHAAMKMVRIGLVVPQLQYRMYGSLINQMAQVAQNYDREFKQFKLFIIQNQILGSYLLQQNRAFAERELQMESFHAAVISQRREELDNTFAKMDRLSGQMEAESSAMEQAKKEMDEGLRQFQNRQVANALFAVLSAVAQIGLAFLTAGATAPGAVASAGQAVSIAGQAAQGLRRVVEILEQLEAVMEVVAAVKDLVDSLEQVGQIVDAPVMPELPSEADWSIFVNEVEAVAEGMPTEVSEVPVWRAKCKNVAALGREMSITAVQMSELQYDIWVQGMMRDMARSQADRLAAIQPADLTNYLEMATQMDMRTTRMLLGLLNILRIQNAALRYEYLLMPTELTTWPLGMDTVGDLLIAQENAALIGLMQLGPSSDFTSRHVVKDIPVNLLLDGEDWEFEIPVQAGMSSFPSSWSRVRIRHLEMHFVKEASGIGGEIIHQPTTQTGTVYILLQGSTIFHDRRRDQVLPFQAAAPLNYHYAYRLDTGDSTLTNEPSEQFANKFMQMTPFTRWRLRLSASAKENAGLAFPTATALDSTTQIVITFHVTAIRQIDWRHDEE

SEQ ID NO: 296 - protein, 867 aa, Artificial Sequence
  Synthetic
MALVDYGKLFEDLNQISMGVLDRVEFSEVMVIHRMYVRLADLNVGQLEGAEKVRRLYVFADIVVLPVVEWRWPPQIPGSVTVIILCRLLQWPTDGRQSDTELHLTFMKLHAIQREENRWEITAADGMNWGVYIHAEEVQVGVLTMSWSSVLRVSALRSVITSGFRAVSVFEVPGSVRSTLGATLRPDHALYSTTMQATPNASHISAFNLRIVSPSAYRVCPLQNDTDTYLGIPADVAAVLPVDVVTDPNILLGMQTTVHIAELVKACHPSPDVVSAVGEHLNWLNKLLLPLKESTQLQGSESYKECLALLGRVHAAMKMVRIGLVVPQLQYRMYGSLINQMAQVAQNYDREFKQFKLFIIQNQILGSYLLQQNRAFAERELQMESFHAAVISQRREELDNTFAKMDRLSGQMEAESSAMEQAKKEMDEGLRQFQNRQVANALFAVLSAVAQIGLAFLTAGATAPGAVASAGQAVSIAGQAAQGLRRVVEILEQLEAVMEVVAAVKDLVDSLEQVGQIVDAPVMPELPSEADWSIFVNEVEAVAEGMPTEVSEVPVWRAKCKNVAALGREMSITAVQMSELQYDIWVQGMMRDMARSQADRLAAIQPADLTNYLEMATQMDMRTTRMLLGLLNILRIQNAALRYEYLLMPTELTTWPLGMDTVGDLLIAQENAALIGLMQLGPSSDFTSRHVVKDIPVNLLLDGEDWEFEIPVQAGMSSFPSSWSRVRIRHLEMHFVKEASGIGGEIIHQPTTQTGTVYILLQGSTIFHDRRRDQVLPFQAAAPLNYHYAYRLDTGDSTLTNEPSEQFANKFMQMTPFTRWRLRLSASAKENAGLAFPTATALDSTTQIVITFHVTAIRQIDWRHDEE

SEQ ID NO: 297 - protein, 867 aa, Artificial Sequence
  Synthetic
MALVDYGKLFEDLNQISMGVLDRVEFSEVMVIHRMYVRLADLNVGQLEGAEKVRRLYVFCDVVVLPVVEWRWPPQIPGSVTVIILCRLLQWPTDGRQSDTELHLTFMKLHAIQREENRWEITAADGMNWGVYIHAEEVQVGVLTMSWSSVLRVSALRSVITSGFRAVSVFEVPGSVRSTLGATLRPDHALYSTTMQATPNASHISAFNLRIVSPSAYRVCPLQNDTDTYLGIPADVAAVLPVDVVTDPNILLGMQTTVHIAELVKACHPSPDVVSAVGEHLNWLNKLLLPLKESTQLQGSESYKECLALLGRVHAAMKMVRIGLVVPQLQYRMYGSLINQMAQVAQNYDREFKQFKLFIIQNQILGSYLLQQNRAFAERELQMESFHAAVISQRREELDNTFAKMDRLSGQMEAESSAMEQAKKEMDEGLRQFQNRQVANALFAVLSAVAQIGLAFLTAGATAPGAVASAGQAVSIAGQAAQGLRRVVEILEQLEAVMEVVAAVKDLVDSLEQVGQIVDAPVMPELPSEADWSIFVNEVEAVAEGMPTEVSEVPVWRAKCKNVAALGREMSITAVQMSELQYDIWVQGMMRDMARSQADRLAAIQPADLTNYLEMATQMDMRTTRMLLGLLNILRIQNAALRYEYLLMPTELTTWPLGMDTVGDLLIAQENAALIGLMQLGPSSDFTSRHVVKDIPVNLLLDGEDWEFEIPVQAGMSSFPSSWSRVRIRHLEMHFVKEASGIGGEIIHQPTTQTGTVYILLQGSTIFHDRRRDQVLPFQAAAPLNYHYAYRLDTGDSTLTNEPSEQFANKFMQMTPFTRWRLRLSASAKENAGLAFPTATALDSTTQIVITFHVTAIRQIDWRHDEE

SEQ ID NO: 298 - protein, 867 aa, Artificial Sequence
  Synthetic
MALVDYGKLFEDLNQISMGVLDRVEFSEVMVIHRMYVRLADLNVGQLEGAEKVRRLYVFTDIIELPVVEWRWPPQIPGSVTVIILCRLLQWPTDGRQSDTELHLTFMKLHAIQREENRWEITAADGMNWGVYIHAEEVQVGVLTMSWSSVLRVSALRSVITSGFRAVSVFEVPGSVRSTLGATLRPDHALYSTTMQATPNASHISAFNLRIVSPSAYRVCPLQNDTDTYLGIPADVAAVLPVDVVTDPNILLGMQTTVHIAELVKACHPSPDVVSAVGEHLNWLNKLLLPLKESTQLQGSESYKECLALLGRVHAAMKMVRIGLVVPQLQYRMYGSLINQMAQVAQNYDREFKQFKLFIIQNQILGSYLLQQNRAFAERELQMESFHAAVISQRREELDNTFAKMDRLSGQMEAESSAMEQAKKEMDEGLRQFQNRQVANALFAVLSAVAQIGLAFLTAGATAPGAVASAGQAVSIAGQAAQGLRRVVEILEQLEAVMEVVAAVKDLVDSLEQVGQIVDAPVMPELPSEADWSIFVNEVEAVAEGMPTEVSEVPVWRAKCKNVAALGREMSITAVQMSELQYDIWVQGMMRDMARSQADRLAAIQPADLTNYLEMATQMDMRTTRMLLGLLNILRIQNAALRYEYLLMPTELTTWPLGMDTVGDLLIAQENAALIGLMQLGPSSDFTSRHVVKDIPVNLLLDGEDWEFEIPVQAGMSSFPSSWSRVRIRHLEMHFVKEASGIGGEIIHQPTTQTGTVYILLQGSTIFHDRRRDQVLPFQAAAPLNYHYAYRLDTGDSTLTNEPSEQFANKFMQMTPFTRWRLRLSASAKENAGLAFPTATALDSTTQIVITFHVTAIRQIDWRHDEE

SEQ ID NO: 299 - protein, 867 aa, Artificial Sequence
  Synthetic
MALVDYGKLFEDLNQISMGVLDRVEFSEVMVIHRMYVRLADLNVGQLEGAEKVRRLYVFTDVLVLPVVEWRWPPQIPGSVTVIILCRLLQWPTDGRQSDTELHLTFMKLHAIQREENRWEITAADGMNWGVYIHAEEVQVGVLTMSWSSVLRVSALRSVITSGFRAVSVFEVPGSVRSTLGATLRPDHALYSTTMQATPNASHISAFNLRIVSPSAYRVCPLQNDTDTYLGIPADVAAVLPVDVVTDPNILLGMQTTVHIAELVKACHPSPDVVSAVGEHLNWLNKLLLPLKESTQLQGSESYKECLALLGRVHAAMKMVRIGLVVPQLQYRMYGSLINQMAQVAQNYDREFKQFKLFIIQNQILGSYLLQQNRAFAERELQMESFHAAVISQRREELDNTFAKMDRLSGQMEAESSAMEQAKKEMDEGLRQFQNRQVANALFAVLSAVAQIGLAFLTAGATAPGAVASAGQAVSIAGQAAQGLRRVVEILEQLEAVMEVVAAVKDLVDSLEQVGQIVDAPVMPELPSEADWSIFVNEVEAVAEGMPTEVSEVPVWRAKCKNVAALGREMSITAVQMSELQYDIWVQGMMRDMARSQADRLAAIQPADLTNYLEMATQMDMRTTRMLLGLLNILRIQNAALRYEYLLMPTELTTWPLGMDTVGDLLIAQENAALIGLMQLGPSSDFTSRHVVKDIPVNLLLDGEDWEFEIPVQAGMSSFPSSWSRVRIRHLEMHFVKEASGIGGEIIHQPTTQTGTVYILLQGSTIFHDRRRDQVLPFQAAAPLNYHYAYRLDTGDSTLTNEPSEQFANKFMQMTPFTRWRLRLSASAKENAGLAFPTATALDSTTQIVITFHVTAIRQIDWRHDEE

SEQ ID NO: 300 - DNA, 2601 bp, Artificial Sequence
  Synthetic
atggctctcgtggattacggcaagcttttcgaggatctgaaccagataagcatgggtgtactggatcgggtagagttttcagaggtgatggtgatccacaggatgtatgtgaggctagctgatctgaatgtggggcagctcgagggagccgagaaagtgaagcggttgtatgtgtttgcggacgtggtggagctaccagtcgtggaatggcggtggccgccgcaaataccaggatcggtgacggtgatcatattgtgtcgtcttcttcaatggccaactgatgggaggcagtcggacaccgagctccacctgacattcatgaagttgcatgccatacaacgagaggaaaatcggtgggagataaccgcagcagatggcatgaactggggagtttacatacacgcagaggaagtacaggttggcgtgctgacaatgtcatggtcttcggtacttagagtttcggcacttcgctctgttataacctccggctttcgcgccgttagtgtgtttgaggtaccgggaagtgtaaggtccacccttggagctactttaaggcccgatcacgccttatatagtacaactatgcaagccacacccaacgcatcgcatattagtgcttttaaccttcgcatagtttccccgtcggcatatcgtgtttgtcctctccaaaatgacacagatacctacttaggtattccagcagacgtggcggcagttcttccagtagacgtggtgactgatcctaacatcttgctgggcatgcagacaacggtacacattgcggagctagtcaaggcatgtcatccgtcacccgatgttgtgagcgctgtaggggagcacctgaactggctcaacaaactcttactcccacttaaggaatcgactcagttgcaaggaagcgagtcgtacaaggagtgccttgcactcttgggtcgtgttcacgctgcgatgaagatggtgagaattggcttagtagtgccccagctgcaatacagaatgtacggtagcctcatcaaccaaatggcccaagtagcacaaaactacgaccgagaattcaagcaattcaaattattcatcatccaaaatcaaatccttggcagctatttgctgcagcagaacagggcatttgctgagagggagctgcagatggagagctttcatgctgctgtcatttctcaaagaagggaggagttggacaatacattcgcaaagatggaccgattgagcgggcaaatggaggcagagagtagtgcaatggagcaagccaaaaaggaaatggacgaaggattgaggcagttccagaataggcaagttgcgaacgccctctttgccgttcttagcgctgtagctcagattgggcttgcattccttacggctggtgcaacggctcctggagctgtggcgtcggcggggcaagctgtgagcatagcaggtcaggcggcgcaaggtctgcgaagggtggtggaaattctagagcagctggaggctgtgatggaggttgtggctgctgtgaaggacctcgtggattcattggaacaggtaggtcagattgtggacgcaccggtgatgccggaattgccctcagaggcggactggtccatttttgtgaacgaggtggaggccgtggcagagggcatgccaacggaagtctcggaggttccggtgtggcacgcccggtgcaagtccgtggctgcactgggtcgggagatgagcatcacggcagtacagatgtcggagctgcagtatgacatctgggtgcaaggcatgatgcgggatatggctcgaagccaggcagacaggctggccgcaattcaacccgcggaccttaccaactatttggagatggctacccagatggatatgcggactacgaggatgctgctggggctcctcaacatattgcgcatccagaatgcggcgctcaggtacgagtatcttctaatgcccacggagctcacaacatggccactgggtatggataccgtgggtgacttgctcatcgcgcaggagaatgctgcactgataggattaatgcagctagggccctcatctgatttcacgagcaggcatgtggtgaaagacatacctgtgaacttgctgctcgatggcgaggattgggagtttgagattcctgtgcaagctggcatgtccagcttcccttccagctggtctcgcgtccgtattcggcacctggagatgcactttgtgaaggaggccagcggtattggtggtgagattatccaccagcctaccacccagactgggaccgtttacatccttctgcagggttccactatcttccatgaccgcagaagagaccaggtgttgccttttcaggccgctgctccgctcaactaccattacgcgtaccgcctcgacaccggcgactccactctcacaaacgaaccctctgaacagtttgccaacaagttcatgcagatgacacccttcacccgttggaggcttcgtctgtctgcgtccgcaaaagagaatgcaggattagcctttcccacggctacagcacttgactccactacccagattgtcatcactttccatgttacggccatcagacaaattgactggcggcacgacgaagag

SEQ ID NO: 301 - DNA, 2601 bp, Artificial Sequence
  Synthetic
atggctctcgtggattacggcaagcttttcgaggatctgaaccagataagcatgggtgtactggatcgggtagagttttcagaggtgatggtgatccacaggatgtatgtgaggctagctgatctgaatgtggggcagctcgagggagccgagaaagtgaagcggttgtatgtgtttgcggacgtggtggagctaccagtcgtggaatggcggtggccgccgcaaataccaggatcggtgacggtgatcatattgtgtcgtcttcttcaatggccaactgatgggaggcagtcggacaccgagctccacctgacattcatgaagttgcatgccatacaacgagaggaaaatcggtgggagataaccgcagcagatggcatgaactggggagtttacatacacgcagaggaagtacaggttggcgtgctgacaatgtcatggtcttcggtacttagagtttcggcacttcgctctgttataacctccggctttcgcgccgttagtgtgtttgaggtaccgggaagtgtaaggtccacccttggagctactttaaggcccgatcacgccttatatagtacaactatgcaagccacacccaacgcatcgcatattagtgcttttaaccttcgcatagtttccccgtcggcatatcgtgtttgtcctctccaaaatgacacagatacctacttaggtattccagcagacgtggcggcagttcttccagtagacgtggtgactgatcctaacatcttgctgggcatgcagacaacggtacacattgcggagctagtcaaggcatgtcatccgtcacccgatgttgtgagcgctgtaggggagcacctgaactggctcaacaaactcttactcccacttaaggaatcgactcagttgcaaggaagcgagtcgtacaaggagtgccttgcactcttgggtcgtgttcacgctgcgatgaagatggtgagaattggcttagtagtgccccagctgcaatacagaatgtacggtagcctcatcaaccaaatggcccaagtagcacaaaactacgaccgagaattcaagcaattcaaattattcatcatccaaaatcaaatccttggcagctatttgctgcagcagaacagggcatttgctgagagggagctgcagatggagagctttcatgctgctgtcatttctcaaagaagggaggagttggacaatacattcgcaaagatggaccgattgagcgggcaaatggaggcagagagtagtgcaatggagcaagccaaaaaggaaatggacgaaggattgaggcagttccagaataggcaagttgcgaacgccctctttgccgttcttagcgctgtagctcagattgggcttgcattccttacggctggtgcaacggctcctggagctgtggcgtcggcggggcaagctgtgagcatagcaggtcaggcggcgcaaggtctgcgaagggtggtggaaattctagagcagctggaggctgtgatggaggttgtggctgctgtgaaggacctcgtggattcattggaacaggtaggtcagattgtggacgcaccggtgatgccggaattgccctcagaggcggactggtccatttttgtgaacgaggtggaggccgtggcagagggcatgccaacggaagtctcggaggttccggtgtggcacggcaagtgcaagaatgtggctgcactgggtcgggagatgagcatcacggcagtacagatgtcggagctgcagtatgacatctgggtgcaaggcatgatgcgggatatggctcgaagccaggcagacaggctggccgcaattcaacccgcggaccttaccaactatttggagatggctacccagatggatatgcggactacgaggatgctgctggggctcctcaacatattgcgcatccagaatgcggcgctcaggtacgagtatcttctaatgcccacggagctcacaacatggccactgggtatggataccgtgggtgacttgctcatcgcgcaggagaatgctgcactgataggattaatgcagctagggccctcatctgatttcacgagcaggcatgtggtgaaagacatacctgtgaacttgctgctcgatggcgaggattgggagtttgagattcctgtgcaagctggcatgtccagcttcccttccagctggtctcgcgtccgtattcggcacctggagatgcactttgtgaaggaggccagcggtattggtggtgagattatccaccagcctaccacccagactgggaccgtttacatccttctgcagggttccactatcttccatgaccgcagaagagaccaggtgttgccttttcaggccgctgctccgctcaactaccattacgcgtaccgcctcgacaccggcgactccactctcacaaacgaaccctctgaacagtttgccaacaagttcatgcagatgacacccttcacccgttggaggcttcgtctgtctgcgtccgcaaaagagaatgcaggattagcctttcccacggctacagcacttgactccactacccagattgtcatcactttccatgttacggccatcagacaaattgactggcggcacgacgaagag

SEQ ID NO: 302 - DNA, 2601 bp, Artificial Sequence
  Synthetic
atggctctcgtggattacggcaagcttttcgaggatctgaaccagataagcatgggtgtactggatcgggtagagttttcagaggtgatggtgatccacaggatgtatgtgaggctagctgatctgaatgtggggcagctcgagggagccgagaaagtgaagcggttgtatgtgtttgcggacgtggtggagctaccagtcgtggaatggcggtggccgccgcaaataccaggatcggtgacggtgatcatattgtgtcgtcttcttcaatggccaactgatgggaggcagtcggacaccgagctccacctgacattcatgaagttgcatgccatacaacgagaggaaaatcggtgggagataaccgcagcagatggcatgaactggggagtttacatacacgcagaggaagtacaggttggcgtgctgacaatgtcatggtcttcggtacttagagtttcggcacttcgctctgttataacctccggctttcgcgccgttagtgtgtttgaggtaccgggaagtgtaaggtccacccttggagctactttaaggcccgatcacgccttatatagtacaactatgcaagccacacccaacgcatcgcatattagtgcttttaaccttcgcatagtttccccgtcggcatatcgtgtttgtcctctccaaaatgacacagatacctacttaggtattccagcagacgtggcggcagttcttccagtagacgtggtgactgatcctaacatcttgctgggcatgcagacaacggtacacattgcggagctagtcaaggcatgtcatccgtcacccgatgttgtgagcgctgtaggggagcacctgaactggctcaacaaactcttactcccacttaaggaatcgactcagttgcaaggaagcgagtcgtacaaggagtgccttgcactcttgggtcgtgttcacgctgcgatgaagatggtgagaattggcttagtagtgccccagctgcaatacagaatgtacggtagcctcatcaaccaaatggcccaagtagcacaaaactacgaccgagaattcaagcaattcaaattattcatcatccaaaatcaaatccttggcagctatttgctgcagcagaacagggcatttgctgagagggagctgcagatggagagctttcatgctgctgtcatttctcaaagaagggaggagttggacaatacattcgcaaagatggaccgattgagcgggcaaatggaggcagagagtagtgcaatggagcaagccaaaaaggaaatggacgaaggattgaggcagttccagaataggcaagttgcgaacgccctctttgccgttcttagcgctgtagctcagattgggcttgcattccttacggctggtgcaacggctcctggagctgtggcgtcggcggggcaagctgtgagcatagcaggtcaggcggcgcaaggtctgcgaagggtggtggaaattctagagcagctggaggctgtgatggaggttgtggctgctgtgaaggacctcgtggattcattggaacaggtaggtcagattgtggacgcaccggtgatgccggaattgccctcagaggcggactggtccatttttgtgaacgaggtggaggccgtggcagagggcatgccaacggaagtctcggaggttccggtgtggatcgccaagtgcaagtgcgtggctgcactgggtcgggagatgagcatcacggcagtacagatgtcggagctgcagtatgacatctgggtgcaaggcatgatgcgggatatggctcgaagccaggcagacaggctggccgcaattcaacccgcggaccttaccaactatttggagatggctacccagatggatatgcggactacgaggatgctgctggggctcctcaacatattgcgcatccagaatgcggcgctcaggtacgagtatcttctaatgcccacggagctcacaacatggccactgggtatggataccgtgggtgacttgctcatcgcgcaggagaatgctgcactgataggattaatgcagctagggccctcatctgatttcacgagcaggcatgtggtgaaagacatacctgtgaacttgctgctcgatggcgaggattgggagtttgagattcctgtgcaagctggcatgtccagcttcccttccagctggtctcgcgtccgtattcggcacctggagatgcactttgtgaaggaggccagcggtattggtggtgagattatccaccagcctaccacccagactgggaccgtttacatccttctgcagggttccactatcttccatgaccgcagaagagaccaggtgttgccttttcaggccgctgctccgctcaactaccattacgcgtaccgcctcgacaccggcgactccactctcacaaacgaaccctctgaacagtttgccaacaagttcatgcagatgacacccttcacccgttggaggcttcgtctgtctgcgtccgcaaaagagaatgcaggattagcctttcccacggctacagcacttgactccactacccagattgtcatcactttccatgttacggccatcagacaaattgactggcggcacgacgaagag

SEQ ID NO: 303 - DNA, 2601 bp, Artificial Sequence
  Synthetic
atggctctcgtggattacggcaagcttttcgaggatctgaaccagataagcatgggtgtactggatcgggtagagttttcagaggtgatggtgatccacaggatgtatgtgaggctagctgatctgaatgtggggcagctcgagggagccgagaaagtgaagcggttgtatgtgtttgcggacgtggtggagctaccagtcgtggaatggcggtggccgccgcaaataccaggatcggtgacggtgatcatattgtgtcgtcttcttcaatggccaactgatgggaggcagtcggacaccgagctccacctgacattcatgaagttgcatgccatacaacgagaggaaaatcggtgggagataaccgcagcagatggcatgaactggggagtttacatacacgcagaggaagtacaggttggcgtgctgacaatgtcatggtcttcggtacttagagtttcggcacttcgctctgttataacctccggctttcgcgccgttagtgtgtttgaggtaccgggaagtgtaaggtccacccttggagctactttaaggcccgatcacgccttatatagtacaactatgcaagccacacccaacgcatcgcatattagtgcttttaaccttcgcatagtttccccgtcggcatatcgtgtttgtcctctccaaaatgacacagatacctacttaggtattccagcagacgtggcggcagttcttccagtagacgtggtgactgatcctaacatcttgctgggcatgcagacaacggtacacattgcggagctagtcaaggcatgtcatccgtcacccgatgttgtgagcgctgtaggggagcacctgaactggctcaacaaactcttactcccacttaaggaatcgactcagttgcaaggaagcgagtcgtacaaggagtgccttgcactcttgggtcgtgttcacgctgcgatgaagatggtgagaattggcttagtagtgccccagctgcaatacagaatgtacggtagcctcatcaaccaaatggcccaagtagcacaaaactacgaccgagaattcaagcaattcaaattattcatcatccaaaatcaaatccttggcagctatttgctgcagcagaacagggcatttgctgagagggagctgcagatggagagctttcatgctgctgtcatttctcaaagaagggaggagttggacaatacattcgcaaagatggaccgattgagcgggcaaatggaggcagagagtagtgcaatggagcaagccaaaaaggaaatggacgaaggattgaggcagttccagaataggcaagttgcgaacgccctctttgccgttcttagcgctgtagctcagattgggcttgcattccttacggctggtgcaacggctcctggagctgtggcgtcggcggggcaagctgtgagcatagcaggtcaggcggcgcaaggtctgcgaagggtggtggaaattctagagcagctggaggctgtgatggaggttgtggctgctgtgaaggacctcgtggattcattggaacaggtaggtcagattgtggacgcaccggtgatgccggaattgccctcagaggcggactggtccatttttgtgaacgaggtggaggccgtggcagagggcatgccaacggaagtctcggaggttccggtgtggatcgccaagtgcaagagcgtggctgcactgggtcgggagatgagcatcacggcagtacagatgtcggagctgcagtatgacatctgggtgcaaggcatgatgcgggatatggctcgaagccaggcagacaggctggccgcaattcaacccgcggaccttaccaactatttggagatggctacccagatggatatgcggactacgaggatgctgctggggctcctcaacatattgcgcatccagaatgcggcgctcaggtacgagtatcttctaatgcccacggagctcacaacatggccactgggtatggataccgtgggtgacttgctcatcgcgcaggagaatgctgcactgataggattaatgcagctagggccctcatctgatttcacgagcaggcatgtggtgaaagacatacctgtgaacttgctgctcgatggcgaggattgggagtttgagattcctgtgcaagctggcatgtccagcttcccttccagctggtctcgcgtccgtattcggcacctggagatgcactttgtgaaggaggccagcggtattggtggtgagattatccaccagcctaccacccagactgggaccgtttacatccttctgcagggttccactatcttccatgaccgcagaagagaccaggtgttgccttttcaggccgctgctccgctcaactaccattacgcgtaccgcctcgacaccggcgactccactctcacaaacgaaccctctgaacagtttgccaacaagttcatgcagatgacacccttcacccgttggaggcttcgtctgtctgcgtccgcaaaagagaatgcaggattagcctttcccacggctacagcacttgactccactacccagattgtcatcactttccatgttacggccatcagacaaattgactggcggcacgacgaagag

SEQ ID NO: 304 - DNA, 2601 bp, Artificial Sequence
  Synthetic
atggctctcgtggattacggcaagcttttcgaggatctgaaccagataagcatgggtgtactggatcgggtagagttttcagaggtgatggtgatccacaggatgtatgtgaggctagctgatctgaatgtggggcagctcgagggagccgagaaagtgaagcggttgtatgtgtttgcggacgtggtggagctaccagtcgtggaatggcggtggccgccgcaaataccaggatcggtgacggtgatcatattgtgtcgtcttcttcaatggccaactgatgggaggcagtcggacaccgagctccacctgacattcatgaagttgcatgccatacaacgagaggaaaatcggtgggagataaccgcagcagatggcatgaactggggagtttacatacacgcagaggaagtacaggttggcgtgctgacaatgtcatggtcttcggtacttagagtttcggcacttcgctctgttataacctccggctttcgcgccgttagtgtgtttgaggtaccgggaagtgtaaggtccacccttggagctactttaaggcccgatcacgccttatatagtacaactatgcaagccacacccaacgcatcgcatattagtgcttttaaccttcgcatagtttccccgtcggcatatcgtgtttgtcctctccaaaatgacacagatacctacttaggtattccagcagacgtggcggcagttcttccagtagacgtggtgactgatcctaacatcttgctgggcatgcagacaacggtacacattgcggagctagtcaaggcatgtcatccgtcacccgatgttgtgagcgctgtaggggagcacctgaactggctcaacaaactcttactcccacttaaggaatcgactcagttgcaaggaagcgagtcgtacaaggagtgccttgcactcttgggtcgtgttcacgctgcgatgaagatggtgagaattggcttagtagtgccccagctgcaatacagaatgtacggtagcctcatcaaccaaatggcccaagtagcacaaaactacgaccgagaattcaagcaattcaaattattcatcatccaaaatcaaatccttggcagctatttgctgcagcagaacagggcatttgctgagagggagctgcagatggagagctttcatgctgctgtcatttctcaaagaagggaggagttggacaatacattcgcaaagatggaccgattgagcgggcaaatggaggcagagagtagtgcaatggagcaagccaaaaaggaaatggacgaaggattgaggcagttccagaataggcaagttgcgaacgccctctttgccgttcttagcgctgtagctcagattgggcttgcattccttacggctggtgcaacggctcctggagctgtggcgtcggcggggcaagctgtgagcatagcaggtcaggcggcgcaaggtctgcgaagggtggtggaaattctagagcagctggaggctgtgatggaggttgtggctgctgtgaaggacctcgtggattcattggaacaggtaggtcagattgtggacgcaccggtgatgccggaattgccctcagaggcggactggtccatttttgtgaacgaggtggaggccgtggcagagggcatgccaacggaagtctcggaggttccggtgtggatcggcaagtgcaagaatgtggctgcactgggtcgggagatgagcatcacggcagtacagatgtcggagctgcagtatgacatctgggtgcaaggcatgatgcgggatatggctcgaagccaggcagacaggctggccgcaattcaacccgcggaccttaccaactatttggagatggctacccagatggatatgcggactacgaggatgctgctggggctcctcaacatattgcgcatccagaatgcggcgctcaggtacgagtatcttctaatgcccacggagctcacaacatggccactgggtatggataccgtgggtgacttgctcatcgcgcaggagaatgctgcactgataggattaatgcagctagggccctcatctgatttcacgagcaggcatgtggtgaaagacatacctgtgaacttgctgctcgatggcgaggattgggagtttgagattcctgtgcaagctggcatgtccagcttcccttccagctggtctcgcgtccgtattcggcacctggagatgcactttgtgaaggaggccagcggtattggtggtgagattatccaccagcctaccacccagactgggaccgtttacatccttctgcagggttccactatcttccatgaccgcagaagagaccaggtgttgccttttcaggccgctgctccgctcaactaccattacgcgtaccgcctcgacaccggcgactccactctcacaaacgaaccctctgaacagtttgccaacaagttcatgcagatgacacccttcacccgttggaggcttcgtctgtctgcgtccgcaaaagagaatgcaggattagcctttcccacggctacagcacttgactccactacccagattgtcatcactttccatgttacggccatcagacaaattgactggcggcacgacgaagag

SEQ ID NO: 305 - DNA, 2601 bp, Artificial Sequence
  Synthetic
atggctctcgtggattacggcaagcttttcgaggatctgaaccagataagcatgggtgtactggatcgggtagagttttcagaggtgatggtgatccacaggatgtatgtgaggctagctgatctgaatgtggggcagctcgagggagccgagaaagtgaagcggttgtatgtgtttgcggacgtggtggagctaccagtcgtggaatggcggtggccgccgcaaataccaggatcggtgacggtgatcatattgtgtcgtcttcttcaatggccaactgatgggaggcagtcggacaccgagctccacctgacattcatgaagttgcatgccatacaacgagaggaaaatcggtgggagataaccgcagcagatggcatgaactggggagtttacatacacgcagaggaagtacaggttggcgtgctgacaatgtcatggtcttcggtacttagagtttcggcacttcgctctgttataacctccggctttcgcgccgttagtgtgtttgaggtaccgggaagtgtaaggtccacccttggagctactttaaggcccgatcacgccttatatagtacaactatgcaagccacacccaacgcatcgcatattagtgcttttaaccttcgcatagtttccccgtcggcatatcgtgtttgtcctctccaaaatgacacagatacctacttaggtattccagcagacgtggcggcagttcttccagtagacgtggtgactgatcctaacatcttgctgggcatgcagacaacggtacacattgcggagctagtcaaggcatgtcatccgtcacccgatgttgtgagcgctgtaggggagcacctgaactggctcaacaaactcttactcccacttaaggaatcgactcagttgcaaggaagcgagtcgtacaaggagtgccttgcactcttgggtcgtgttcacgctgcgatgaagatggtgagaattggcttagtagtgccccagctgcaatacagaatgtacggtagcctcatcaaccaaatggcccaagtagcacaaaactacgaccgagaattcaagcaattcaaattattcatcatccaaaatcaaatccttggcagctatttgctgcagcagaacagggcatttgctgagagggagctgcagatggagagctttcatgctgctgtcatttctcaaagaagggaggagttggacaatacattcgcaaagatggaccgattgagcgggcaaatggaggcagagagtagtgcaatggagcaagccaaaaaggaaatggacgaaggattgaggcagttccagaataggcaagttgcgaacgccctctttgccgttcttagcgctgtagctcagattgggcttgcattccttacggctggtgcaacggctcctggagctgtggcgtcggcggggcaagctgtgagcatagcaggtcaggcggcgcaaggtctgcgaagggtggtggaaattctagagcagctggaggctgtgatggaggttgtggctgctgtgaaggacctcgtggattcattggaacaggtaggtcagattgtggacgcaccggtgatgccggaattgccctcagaggcggactggtccatttttgtgaacgaggtggaggccgtggcagagggcatgccaacggaagtctcggaggttccggtgtggatcggcaagtgcaagtccgtggctgcactgggtcgggagatgagcatcacggcagtacagatgtcggagctgcagtatgacatctgggtgcaaggcatgatgcgggatatggctcgaagccaggcagacaggctggccgcaattcaacccgcggaccttaccaactatttggagatggctacccagatggatatgcggactacgaggatgctgctggggctcctcaacatattgcgcatccagaatgcggcgctcaggtacgagtatcttctaatgcccacggagctcacaacatggccactgggtatggataccgtgggtgacttgctcatcgcgcaggagaatgctgcactgataggattaatgcagctagggccctcatctgatttcacgagcaggcatgtggtgaaagacatacctgtgaacttgctgctcgatggcgaggattgggagtttgagattcctgtgcaagctggcatgtccagcttcccttccagctggtctcgcgtccgtattcggcacctggagatgcactttgtgaaggaggccagcggtattggtggtgagattatccaccagcctaccacccagactgggaccgtttacatccttctgcagggttccactatcttccatgaccgcagaagagaccaggtgttgccttttcaggccgctgctccgctcaactaccattacgcgtaccgcctcgacaccggcgactccactctcacaaacgaaccctctgaacagtttgccaacaagttcatgcagatgacacccttcacccgttggaggcttcgtctgtctgcgtccgcaaaagagaatgcaggattagcctttcccacggctacagcacttgactccactacccagattgtcatcactttccatgttacggccatcagacaaattgactggcggcacgacgaagag

SEQ ID NO: 306 - DNA, 2601 bp, Artificial Sequence
  Synthetic
atggctctcgtggattacggcaagcttttcgaggatctgaaccagataagcatgggtgtactggatcgggtagagttttcagaggtgatggtgatccacaggatgtatgtgaggctagctgatctgaatgtggggcagctcgagggagccgagaaagtgaagcggttgtatgtgtttgcggacgtggtggagctaccagtcgtggaatggcggtggccgccgcaaataccaggatcggtgacggtgatcatattgtgtcgtcttcttcaatggccaactgatgggaggcagtcggacaccgagctccacctgacattcatgaagttgcatgccatacaacgagaggaaaatcggtgggagataaccgcagcagatggcatgaactggggagtttacatacacgcagaggaagtacaggttggcgtgctgacaatgtcatggtcttcggtacttagagtttcggcacttcgctctgttataacctccggctttcgcgccgttagtgtgtttgaggtaccgggaagtgtaaggtccacccttggagctactttaaggcccgatcacgccttatatagtacaactatgcaagccacacccaacgcatcgcatattagtgcttttaaccttcgcatagtttccccgtcggcatatcgtgtttgtcctctccaaaatgacacagatacctacttaggtattccagcagacgtggcggcagttcttccagtagacgtggtgactgatcctaacatcttgctgggcatgcagacaacggtacacattgcggagctagtcaaggcatgtcatccgtcacccgatgttgtgagcgctgtaggggagcacctgaactggctcaacaaactcttactcccacttaaggaatcgactcagttgcaaggaagcgagtcgtacaaggagtgccttgcactcttgggtcgtgttcacgctgcgatgaagatggtgagaattggcttagtagtgccccagctgcaatacagaatgtacggtagcctcatcaaccaaatggcccaagtagcacaaaactacgaccgagaattcaagcaattcaaattattcatcatccaaaatcaaatccttggcagctatttgctgcagcagaacagggcatttgctgagagggagctgcagatggagagctttcatgctgctgtcatttctcaaagaagggaggagttggacaatacattcgcaaagatggaccgattgagcgggcaaatggaggcagagagtagtgcaatggagcaagccaaaaaggaaatggacgaaggattgaggcagttccagaataggcaagttgcgaacgccctctttgccgttcttagcgctgtagctcagattgggcttgcattccttacggctggtgcaacggctcctggagctgtggcgtcggcggggcaagctgtgagcatagcaggtcaggcggcgcaaggtctgcgaagggtggtggaaattctagagcagctggaggctgtgatggaggttgtggctgctgtgaaggacctcgtggattcattggaacaggtaggtcagattgtggacgcaccggtgatgccggaattgccctcagaggcggactggtccatttttgtgaacgaggtggaggccgtggcagagggcatgccaacggaagtctcggaggttccggtgtggatcggcaagtgcaacaatgtggctgcactgggtcgggagatgagcatcacggcagtacagatgtcggagctgcagtatgacatctgggtgcaaggcatgatgcgggatatggctcgaagccaggcagacaggctggccgcaattcaacccgcggaccttaccaactatttggagatggctacccagatggatatgcggactacgaggatgctgctggggctcctcaacatattgcgcatccagaatgcggcgctcaggtacgagtatcttctaatgcccacggagctcacaacatggccactgggtatggataccgtgggtgacttgctcatcgcgcaggagaatgctgcactgataggattaatgcagctagggccctcatctgatttcacgagcaggcatgtggtgaaagacatacctgtgaacttgctgctcgatggcgaggattgggagtttgagattcctgtgcaagctggcatgtccagcttcccttccagctggtctcgcgtccgtattcggcacctggagatgcactttgtgaaggaggccagcggtattggtggtgagattatccaccagcctaccacccagactgggaccgtttacatccttctgcagggttccactatcttccatgaccgcagaagagaccaggtgttgccttttcaggccgctgctccgctcaactaccattacgcgtaccgcctcgacaccggcgactccactctcacaaacgaaccctctgaacagtttgccaacaagttcatgcagatgacacccttcacccgttggaggcttcgtctgtctgcgtccgcaaaagagaatgcaggattagcctttcccacggctacagcacttgactccactacccagattgtcatcactttccatgttacggccatcagacaaattgactggcggcacgacgaagag

SEQ ID NO: 307 - DNA, 2601 bp, Artificial Sequence
  Synthetic
atggctctcgtggattacggcaagcttttcgaggatctgaaccagataagcatgggtgtactggatcgggtagagttttcagaggtgatggtgatccacaggatgtatgtgaggctagctgatctgaatgtggggcagctcgagggagccgagaaagtgaagcggttgtatgtgtttgcggacgtggtggagctaccagtcgtggaatggcggtggccgccgcaaataccaggatcggtgacggtgatcatattgtgtcgtcttcttcaatggccaactgatgggaggcagtcggacaccgagctccacctgacattcatgaagttgcatgccatacaacgagaggaaaatcggtgggagataaccgcagcagatggcatgaactggggagtttacatacacgcagaggaagtacaggttggcgtgctgacaatgtcatggtcttcggtacttagagtttcggcacttcgctctgttataacctccggctttcgcgccgttagtgtgtttgaggtaccgggaagtgtaaggtccacccttggagctactttaaggcccgatcacgccttatatagtacaactatgcaagccacacccaacgcatcgcatattagtgcttttaaccttcgcatagtttccccgtcggcatatcgtgtttgtcctctccaaaatgacacagatacctacttaggtattccagcagacgtggcggcagttcttccagtagacgtggtgactgatcctaacatcttgctgggcatgcagacaacggtacacattgcggagctagtcaaggcatgtcatccgtcacccgatgttgtgagcgctgtaggggagcacctgaactggctcaacaaactcttactcccacttaaggaatcgactcagttgcaaggaagcgagtcgtacaaggagtgccttgcactcttgggtcgtgttcacgctgcgatgaagatggtgagaattggcttagtagtgccccagctgcaatacagaatgtacggtagcctcatcaaccaaatggcccaagtagcacaaaactacgaccgagaattcaagcaattcaaattattcatcatccaaaatcaaatccttggcagctatttgctgcagcagaacagggcatttgctgagagggagctgcagatggagagctttcatgctgctgtcatttctcaaagaagggaggagttggacaatacattcgcaaagatggaccgattgagcgggcaaatggaggcagagagtagtgcaatggagcaagccaaaaaggaaatggacgaaggattgaggcagttccagaataggcaagttgcgaacgccctctttgccgttcttagcgctgtagctcagattgggcttgcattccttacggctggtgcaacggctcctggagctgtggcgtcggcggggcaagctgtgagcatagcaggtcaggcggcgcaaggtctgcgaagggtggtggaaattctagagcagctggaggctgtgatggaggttgtggctgctgtgaaggacctcgtggattcattggaacaggtaggtcagattgtggacgcaccggtgatgccggaattgccctcagaggcggactggtccatttttgtgaacgaggtggaggccgtggcagagggcatgccaacggaagtctcggaggttccggtgtggatcgtcaagtgcaagagcgtggctgcactgggtcgggagatgagcatcacggcagtacagatgtcggagctgcagtatgacatctgggtgcaaggcatgatgcgggatatggctcgaagccaggcagacaggctggccgcaattcaacccgcggaccttaccaactatttggagatggctacccagatggatatgcggactacgaggatgctgctggggctcctcaacatattgcgcatccagaatgcggcgctcaggtacgagtatcttctaatgcccacggagctcacaacatggccactgggtatggataccgtgggtgacttgctcatcgcgcaggagaatgctgcactgataggattaatgcagctagggccctcatctgatttcacgagcaggcatgtggtgaaagacatacctgtgaacttgctgctcgatggcgaggattgggagtttgagattcctgtgcaagctggcatgtccagcttcccttccagctggtctcgcgtccgtattcggcacctggagatgcactttgtgaaggaggccagcggtattggtggtgagattatccaccagcctaccacccagactgggaccgtttacatccttctgcagggttccactatcttccatgaccgcagaagagaccaggtgttgccttttcaggccgctgctccgctcaactaccattacgcgtaccgcctcgacaccggcgactccactctcacaaacgaaccctctgaacagtttgccaacaagttcatgcagatgacacccttcacccgttggaggcttcgtctgtctgcgtccgcaaaagagaatgcaggattagcctttcccacggctacagcacttgactccactacccagattgtcatcactttccatgttacggccatcagacaaattgactggcggcacgacgaagag

SEQ ID NO: 308 - DNA, 2601 bp, Artificial Sequence
  Synthetic
atggctctcgtggattacggcaagcttttcgaggatctgaaccagataagcatgggtgtactggatcgggtagagttttcagaggtgatggtgatccacaggatgtatgtgaggctagctgatctgaatgtggggcagctcgagggagccgagaaagtgaagcggttgtatgtgtttgcggacgtggtggagctaccagtcgtggaatggcggtggccgccgcaaataccaggatcggtgacggtgatcatattgtgtcgtcttcttcaatggccaactgatgggaggcagtcggacaccgagctccacctgacattcatgaagttgcatgccatacaacgagaggaaaatcggtgggagataaccgcagcagatggcatgaactggggagtttacatacacgcagaggaagtacaggttggcgtgctgacaatgtcatggtcttcggtacttagagtttcggcacttcgctctgttataacctccggctttcgcgccgttagtgtgtttgaggtaccgggaagtgtaaggtccacccttggagctactttaaggcccgatcacgccttatatagtacaactatgcaagccacacccaacgcatcgcatattagtgcttttaaccttcgcatagtttccccgtcggcatatcgtgtttgtcctctccaaaatgacacagatacctacttaggtattccagcagacgtggcggcagttcttccagtagacgtggtgactgatcctaacatcttgctgggcatgcagacaacggtacacattgcggagctagtcaaggcatgtcatccgtcacccgatgttgtgagcgctgtaggggagcacctgaactggctcaacaaactcttactcccacttaaggaatcgactcagttgcaaggaagcgagtcgtacaaggagtgccttgcactcttgggtcgtgttcacgctgcgatgaagatggtgagaattggcttagtagtgccccagctgcaatacagaatgtacggtagcctcatcaaccaaatggcccaagtagcacaaaactacgaccgagaattcaagcaattcaaattattcatcatccaaaatcaaatccttggcagctatttgctgcagcagaacagggcatttgctgagagggagctgcagatggagagctttcatgctgctgtcatttctcaaagaagggaggagttggacaatacattcgcaaagatggaccgattgagcgggcaaatggaggcagagagtagtgcaatggagcaagccaaaaaggaaatggacgaaggattgaggcagttccagaataggcaagttgcgaacgccctctttgccgttcttagcgctgtagctcagattgggcttgcattccttacggctggtgcaacggctcctggagctgtggcgtcggcggggcaagctgtgagcatagcaggtcaggcggcgcaaggtctgcgaagggtggtggaaattctagagcagctggaggctgtgatggaggttgtggctgctgtgaaggacctcgtggattcattggaacaggtaggtcagattgtggacgcaccggtgatgccggaattgccctcagaggcggactggtccatttttgtgaacgaggtggaggccgtggcagagggcatgccaacggaagtctcggaggttccggtgtggctggccaggtgcaagaatgtggctgcactgggtcgggagatgagcatcacggcagtacagatgtcggagctgcagtatgacatctgggtgcaaggcatgatgcgggatatggctcgaagccaggcagacaggctggccgcaattcaacccgcggaccttaccaactatttggagatggctacccagatggatatgcggactacgaggatgctgctggggctcctcaacatattgcgcatccagaatgcggcgctcaggtacgagtatcttctaatgcccacggagctcacaacatggccactgggtatggataccgtgggtgacttgctcatcgcgcaggagaatgctgcactgataggattaatgcagctagggccctcatctgatttcacgagcaggcatgtggtgaaagacatacctgtgaacttgctgctcgatggcgaggattgggagtttgagattcctgtgcaagctggcatgtccagcttcccttccagctggtctcgcgtccgtattcggcacctggagatgcactttgtgaaggaggccagcggtattggtggtgagattatccaccagcctaccacccagactgggaccgtttacatccttctgcagggttccactatcttccatgaccgcagaagagaccaggtgttgccttttcaggccgctgctccgctcaactaccattacgcgtaccgcctcgacaccggcgactccactctcacaaacgaaccctctgaacagtttgccaacaagttcatgcagatgacacccttcacccgttggaggcttcgtctgtctgcgtccgcaaaagagaatgcaggattagcctttcccacggctacagcacttgactccactacccagattgtcatcactttccatgttacggccatcagacaaattgactggcggcacgacgaagag

SEQ ID NO: 309 - DNA, 2601 bp, Artificial Sequence
  Synthetic
atggctctcgtggattacggcaagcttttcgaggatctgaaccagataagcatgggtgtactggatcgggtagagttttcagaggtgatggtgatccacaggatgtatgtgaggctagctgatctgaatgtggggcagctcgagggagccgagaaagtgaagcggttgtatgtgtttgcggacgtggtggagctaccagtcgtggaatggcggtggccgccgcaaataccaggatcggtgacggtgatcatattgtgtcgtcttcttcaatggccaactgatgggaggcagtcggacaccgagctccacctgacattcatgaagttgcatgccatacaacgagaggaaaatcggtgggagataaccgcagcagatggcatgaactggggagtttacatacacgcagaggaagtacaggttggcgtgctgacaatgtcatggtcttcggtacttagagtttcggcacttcgctctgttataacctccggctttcgcgccgttagtgtgtttgaggtaccgggaagtgtaaggtccacccttggagctactttaaggcccgatcacgccttatatagtacaactatgcaagccacacccaacgcatcgcatattagtgcttttaaccttcgcatagtttccccgtcggcatatcgtgtttgtcctctccaaaatgacacagatacctacttaggtattccagcagacgtggcggcagttcttccagtagacgtggtgactgatcctaacatcttgctgggcatgcagacaacggtacacattgcggagctagtcaaggcatgtcatccgtcacccgatgttgtgagcgctgtaggggagcacctgaactggctcaacaaactcttactcccacttaaggaatcgactcagttgcaaggaagcgagtcgtacaaggagtgccttgcactcttgggtcgtgttcacgctgcgatgaagatggtgagaattggcttagtagtgccccagctgcaatacagaatgtacggtagcctcatcaaccaaatggcccaagtagcacaaaactacgaccgagaattcaagcaattcaaattattcatcatccaaaatcaaatccttggcagctatttgctgcagcagaacagggcatttgctgagagggagctgcagatggagagctttcatgctgctgtcatttctcaaagaagggaggagttggacaatacattcgcaaagatggaccgattgagcgggcaaatggaggcagagagtagtgcaatggagcaagccaaaaaggaaatggacgaaggattgaggcagttccagaataggcaagttgcgaacgccctctttgccgttcttagcgctgtagctcagattgggcttgcattccttacggctggtgcaacggctcctggagctgtggcgtcggcggggcaagctgtgagcatagcaggtcaggcggcgcaaggtctgcgaagggtggtggaaattctagagcagctggaggctgtgatggaggttgtggctgctgtgaaggacctcgtggattcattggaacaggtaggtcagattgtggacgcaccggtgatgccggaattgccctcagaggcggactggtccatttttgtgaacgaggtggaggccgtggcagagggcatgccaacggaagtctcggaggttccggtgtggctcgccaggtgcaagagcgtggctgcactgggtcgggagatgagcatcacggcagtacagatgtcggagctgcagtatgacatctgggtgcaaggcatgatgcgggatatggctcgaagccaggcagacaggctggccgcaattcaacccgcggaccttaccaactatttggagatggctacccagatggatatgcggactacgaggatgctgctggggctcctcaacatattgcgcatccagaatgcggcgctcaggtacgagtatcttctaatgcccacggagctcacaacatggccactgggtatggataccgtgggtgacttgctcatcgcgcaggagaatgctgcactgataggattaatgcagctagggccctcatctgatttcacgagcaggcatgtggtgaaagacatacctgtgaacttgctgctcgatggcgaggattgggagtttgagattcctgtgcaagctggcatgtccagcttcccttccagctggtctcgcgtccgtattcggcacctggagatgcactttgtgaaggaggccagcggtattggtggtgagattatccaccagcctaccacccagactgggaccgtttacatccttctgcagggttccactatcttccatgaccgcagaagagaccaggtgttgccttttcaggccgctgctccgctcaactaccattacgcgtaccgcctcgacaccggcgactccactctcacaaacgaaccctctgaacagtttgccaacaagttcatgcagatgacacccttcacccgttggaggcttcgtctgtctgcgtccgcaaaagagaatgcaggattagcctttcccacggctacagcacttgactccactacccagattgtcatcactttccatgttacggccatcagacaaattgactggcggcacgacgaagag

SEQ ID NO: 310 - DNA, 2601 bp, Artificial Sequence
  Synthetic
atggctctcgtggattacggcaagcttttcgaggatctgaaccagataagcatgggtgtactggatcgggtagagttttcagaggtgatggtgatccacaggatgtatgtgaggctagctgatctgaatgtggggcagctcgagggagccgagaaagtgaagcggttgtatgtgtttgcggacgtggtggagctaccagtcgtggaatggcggtggccgccgcaaataccaggatcggtgacggtgatcatattgtgtcgtcttcttcaatggccaactgatgggaggcagtcggacaccgagctccacctgacattcatgaagttgcatgccatacaacgagaggaaaatcggtgggagataaccgcagcagatggcatgaactggggagtttacatacacgcagaggaagtacaggttggcgtgctgacaatgtcatggtcttcggtacttagagtttcggcacttcgctctgttataacctccggctttcgcgccgttagtgtgtttgaggtaccgggaagtgtaaggtccacccttggagctactttaaggcccgatcacgccttatatagtacaactatgcaagccacacccaacgcatcgcatattagtgcttttaaccttcgcatagtttccccgtcggcatatcgtgtttgtcctctccaaaatgacacagatacctacttaggtattccagcagacgtggcggcagttcttccagtagacgtggtgactgatcctaacatcttgctgggcatgcagacaacggtacacattgcggagctagtcaaggcatgtcatccgtcacccgatgttgtgagcgctgtaggggagcacctgaactggctcaacaaactcttactcccacttaaggaatcgactcagttgcaaggaagcgagtcgtacaaggagtgccttgcactcttgggtcgtgttcacgctgcgatgaagatggtgagaattggcttagtagtgccccagctgcaatacagaatgtacggtagcctcatcaaccaaatggcccaagtagcacaaaactacgaccgagaattcaagcaattcaaattattcatcatccaaaatcaaatccttggcagctatttgctgcagcagaacagggcatttgctgagagggagctgcagatggagagctttcatgctgctgtcatttctcaaagaagggaggagttggacaatacattcgcaaagatggaccgattgagcgggcaaatggaggcagagagtagtgcaatggagcaagccaaaaaggaaatggacgaaggattgaggcagttccagaataggcaagttgcgaacgccctctttgccgttcttagcgctgtagctcagattgggcttgcattccttacggctggtgcaacggctcctggagctgtggcgtcggcggggcaagctgtgagcatagcaggtcaggcggcgcaaggtctgcgaagggtggtggaaattctagagcagctggaggctgtgatggaggttgtggctgctgtgaaggacctcgtggattcattggaacaggtaggtcagattgtggacgcaccggtgatgccggaattgccctcagaggcggactggtccatttttgtgaacgaggtggaggccgtggcagagggcatgccaacggaagtctcggaggttccggtgtggctgggccggtgcaagaatgtggctgcactgggtcgggagatgagcatcacggcagtacagatgtcggagctgcagtatgacatctgggtgcaaggcatgatgcgggatatggctcgaagccaggcagacaggctggccgcaattcaacccgcggaccttaccaactatttggagatggctacccagatggatatgcggactacgaggatgctgctggggctcctcaacatattgcgcatccagaatgcggcgctcaggtacgagtatcttctaatgcccacggagctcacaacatggccactgggtatggataccgtgggtgacttgctcatcgcgcaggagaatgctgcactgataggattaatgcagctagggccctcatctgatttcacgagcaggcatgtggtgaaagacatacctgtgaacttgctgctcgatggcgaggattgggagtttgagattcctgtgcaagctggcatgtccagcttcccttccagctggtctcgcgtccgtattcggcacctggagatgcactttgtgaaggaggccagcggtattggtggtgagattatccaccagcctaccacccagactgggaccgtttacatccttctgcagggttccactatcttccatgaccgcagaagagaccaggtgttgccttttcaggccgctgctccgctcaactaccattacgcgtaccgcctcgacaccggcgactccactctcacaaacgaaccctctgaacagtttgccaacaagttcatgcagatgacacccttcacccgttggaggcttcgtctgtctgcgtccgcaaaagagaatgcaggattagcctttcccacggctacagcacttgactccactacccagattgtcatcactttccatgttacggccatcagacaaattgactggcggcacgacgaagag

SEQ ID NO: 311 - DNA, 2601 bp, Artificial Sequence
  Synthetic
atggctctcgtggattacggcaagcttttcgaggatctgaaccagataagcatgggtgtactggatcgggtagagttttcagaggtgatggtgatccacaggatgtatgtgaggctagctgatctgaatgtggggcagctcgagggagccgagaaagtgaagcggttgtatgtgtttgcggacgtggtggagctaccagtcgtggaatggcggtggccgccgcaaataccaggatcggtgacggtgatcatattgtgtcgtcttcttcaatggccaactgatgggaggcagtcggacaccgagctccacctgacattcatgaagttgcatgccatacaacgagaggaaaatcggtgggagataaccgcagcagatggcatgaactggggagtttacatacacgcagaggaagtacaggttggcgtgctgacaatgtcatggtcttcggtacttagagtttcggcacttcgctctgttataacctccggctttcgcgccgttagtgtgtttgaggtaccgggaagtgtaaggtccacccttggagctactttaaggcccgatcacgccttatatagtacaactatgcaagccacacccaacgcatcgcatattagtgcttttaaccttcgcatagtttccccgtcggcatatcgtgtttgtcctctccaaaatgacacagatacctacttaggtattccagcagacgtggcggcagttcttccagtagacgtggtgactgatcctaacatcttgctgggcatgcagacaacggtacacattgcggagctagtcaaggcatgtcatccgtcacccgatgttgtgagcgctgtaggggagcacctgaactggctcaacaaactcttactcccacttaaggaatcgactcagttgcaaggaagcgagtcgtacaaggagtgccttgcactcttgggtcgtgttcacgctgcgatgaagatggtgagaattggcttagtagtgccccagctgcaatacagaatgtacggtagcctcatcaaccaaatggcccaagtagcacaaaactacgaccgagaattcaagcaattcaaattattcatcatccaaaatcaaatccttggcagctatttgctgcagcagaacagggcatttgctgagagggagctgcagatggagagctttcatgctgctgtcatttctcaaagaagggaggagttggacaatacattcgcaaagatggaccgattgagcgggcaaatggaggcagagagtagtgcaatggagcaagccaaaaaggaaatggacgaaggattgaggcagttccagaataggcaagttgcgaacgccctctttgccgttcttagcgctgtagctcagattgggcttgcattccttacggctggtgcaacggctcctggagctgtggcgtcggcggggcaagctgtgagcatagcaggtcaggcggcgcaaggtctgcgaagggtggtggaaattctagagcagctggaggctgtgatggaggttgtggctgctgtgaaggacctcgtggattcattggaacaggtaggtcagattgtggacgcaccggtgatgccggaattgccctcagaggcggactggtccatttttgtgaacgaggtggaggccgtggcagagggcatgccaacggaagtctcggaggttccggtgtggctgggcaggtgcaagagcgtggctgcactgggtcgggagatgagcatcacggcagtacagatgtcggagctgcagtatgacatctgggtgcaaggcatgatgcgggatatggctcgaagccaggcagacaggctggccgcaattcaacccgcggaccttaccaactatttggagatggctacccagatggatatgcggactacgaggatgctgctggggctcctcaacatattgcgcatccagaatgcggcgctcaggtacgagtatcttctaatgcccacggagctcacaacatggccactgggtatggataccgtgggtgacttgctcatcgcgcaggagaatgctgcactgataggattaatgcagctagggccctcatctgatttcacgagcaggcatgtggtgaaagacatacctgtgaacttgctgctcgatggcgaggattgggagtttgagattcctgtgcaagctggcatgtccagcttcccttccagctggtctcgcgtccgtattcggcacctggagatgcactttgtgaaggaggccagcggtattggtggtgagattatccaccagcctaccacccagactgggaccgtttacatccttctgcagggttccactatcttccatgaccgcagaagagaccaggtgttgccttttcaggccgctgctccgctcaactaccattacgcgtaccgcctcgacaccggcgactccactctcacaaacgaaccctctgaacagtttgccaacaagttcatgcagatgacacccttcacccgttggaggcttcgtctgtctgcgtccgcaaaagagaatgcaggattagcctttcccacggctacagcacttgactccactacccagattgtcatcactttccatgttacggccatcagacaaattgactggcggcacgacgaagag

SEQ ID NO: 312 - DNA, 2601 bp, Artificial Sequence
  Synthetic
atggctctcgtggattacggcaagcttttcgaggatctgaaccagataagcatgggtgtactggatcgggtagagttttcagaggtgatggtgatccacaggatgtatgtgaggctagctgatctgaatgtggggcagctcgagggagccgagaaagtgaagcggttgtatgtgtttgcggacgtggtggagctaccagtcgtggaatggcggtggccgccgcaaataccaggatcggtgacggtgatcatattgtgtcgtcttcttcaatggccaactgatgggaggcagtcggacaccgagctccacctgacattcatgaagttgcatgccatacaacgagaggaaaatcggtgggagataaccgcagcagatggcatgaactggggagtttacatacacgcagaggaagtacaggttggcgtgctgacaatgtcatggtcttcggtacttagagtttcggcacttcgctctgttataacctccggctttcgcgccgttagtgtgtttgaggtaccgggaagtgtaaggtccacccttggagctactttaaggcccgatcacgccttatatagtacaactatgcaagccacacccaacgcatcgcatattagtgcttttaaccttcgcatagtttccccgtcggcatatcgtgtttgtcctctccaaaatgacacagatacctacttaggtattccagcagacgtggcggcagttcttccagtagacgtggtgactgatcctaacatcttgctgggcatgcagacaacggtacacattgcggagctagtcaaggcatgtcatccgtcacccgatgttgtgagcgctgtaggggagcacctgaactggctcaacaaactcttactcccacttaaggaatcgactcagttgcaaggaagcgagtcgtacaaggagtgccttgcactcttgggtcgtgttcacgctgcgatgaagatggtgagaattggcttagtagtgccccagctgcaatacagaatgtacggtagcctcatcaaccaaatggcccaagtagcacaaaactacgaccgagaattcaagcaattcaaattattcatcatccaaaatcaaatccttggcagctatttgctgcagcagaacagggcatttgctgagagggagctgcagatggagagctttcatgctgctgtcatttctcaaagaagggaggagttggacaatacattcgcaaagatggaccgattgagcgggcaaatggaggcagagagtagtgcaatggagcaagccaaaaaggaaatggacgaaggattgaggcagttccagaataggcaagttgcgaacgccctctttgccgttcttagcgctgtagctcagattgggcttgcattccttacggctggtgcaacggctcctggagctgtggcgtcggcggggcaagctgtgagcatagcaggtcaggcggcgcaaggtctgcgaagggtggtggaaattctagagcagctggaggctgtgatggaggttgtggctgctgtgaaggacctcgtggattcattggaacaggtaggtcagattgtggacgcaccggtgatgccggaattgccctcagaggcggactggtccatttttgtgaacgaggtggaggccgtggcagagggcatgccaacggaagtctcggaggttccggtgtggctggtcaagtgcaagtgcgtggctgcactgggtcgagagatgagcatcacggcagtacagatgtcggagctgcagtatgacatctgggtgcaaggcatgatgcgggatatggctcgaagccaggcagacaggctggccgcaattcaacccgcggaccttaccaactatttggagatggctacccagatggatatgcggactacgaggatgctgctggggctcctcaacatattgcgcatccagaatgcggcgctcaggtacgagtatcttctaatgcccacggagctcacaacatggccactgggtatggataccgtgggtgacttgctcatcgcgcaggagaatgctgcactgataggattaatgcagctagggccctcatctgatttcacgagcaggcatgtggtgaaagacatacctgtgaacttgctgctcgatggcgaggattgggagtttgagattcctgtgcaagctggcatgtccagcttcccttccagctggtctcgcgtccgtattcggcacctggagatgcactttgtgaaggaggccagcggtattggtggtgagattatccaccagcctaccacccagactgggaccgtttacatccttctgcagggttccactatcttccatgaccgcagaagagaccaggtgttgccttttcaggccgctgctccgctcaactaccattacgcgtaccgcctcgacaccggcgactccactctcacaaacgaaccctctgaacagtttgccaacaagttcatgcagatgacacccttcacccgttggaggcttcgtctgtctgcgtccgcaaaagagaatgcaggattagcctttcccacggctacagcacttgactccactacccagattgtcatcactttccatgttacggccatcagacaaattgactggcggcacgacgaagag

SEQ ID NO: 313 - DNA, 2601 bp, Artificial Sequence
  Synthetic
atggctctcgtggattacggcaagcttttcgaggatctgaaccagataagcatgggtgtactggatcgggtagagttttcagaggtgatggtgatccacaggatgtatgtgaggctagctgatctgaatgtggggcagctcgagggagccgagaaagtgaagcggttgtatgtgtttgcggacgtggtggagctaccagtcgtggaatggcggtggccgccgcaaataccaggatcggtgacggtgatcatattgtgtcgtcttcttcaatggccaactgatgggaggcagtcggacaccgagctccacctgacattcatgaagttgcatgccatacaacgagaggaaaatcggtgggagataaccgcagcagatggcatgaactggggagtttacatacacgcagaggaagtacaggttggcgtgctgacaatgtcatggtcttcggtacttagagtttcggcacttcgctctgttataacctccggctttcgcgccgttagtgtgtttgaggtaccgggaagtgtaaggtccacccttggagctactttaaggcccgatcacgccttatatagtacaactatgcaagccacacccaacgcatcgcatattagtgcttttaaccttcgcatagtttccccgtcggcatatcgtgtttgtcctctccaaaatgacacagatacctacttaggtattccagcagacgtggcggcagttcttccagtagacgtggtgactgatcctaacatcttgctgggcatgcagacaacggtacacattgcggagctagtcaaggcatgtcatccgtcacccgatgttgtgagcgctgtaggggagcacctgaactggctcaacaaactcttactcccacttaaggaatcgactcagttgcaaggaagcgagtcgtacaaggagtgccttgcactcttgggtcgtgttcacgctgcgatgaagatggtgagaattggcttagtagtgccccagctgcaatacagaatgtacggtagcctcatcaaccaaatggcccaagtagcacaaaactacgaccgagaattcaagcaattcaaattattcatcatccaaaatcaaatccttggcagctatttgctgcagcagaacagggcatttgctgagagggagctgcagatggagagctttcatgctgctgtcatttctcaaagaagggaggagttggacaatacattcgcaaagatggaccgattgagcgggcaaatggaggcagagagtagtgcaatggagcaagccaaaaaggaaatggacgaaggattgaggcagttccagaataggcaagttgcgaacgccctctttgccgttcttagcgctgtagctcagattgggcttgcattccttacggctggtgcaacggctcctggagctgtggcgtcggcggggcaagctgtgagcatagcaggtcaggcggcgcaaggtctgcgaagggtggtggaaattctagagcagctggaggctgtgatggaggttgtgtctgctgtgaaggacctcgtggattcattggaacaggtaggtcagattgtggacgcaccggtgatgccggaattgccctcagaggcggactggtccatttttgtgaacgaggtggaggccgtggcagagggcatgccaacggaagtctcggaggttccggtgtggatggccaagtgcaagaatgtggctgcactgggtcgggagatgagcatcacggcagtacagatgtcggagctgcagtatgacatctgggtgcaaggcatgatgcgggatatggctcgaagccaggcagacaggctggccgcaattcaacccgcggaccttaccaactatttggagatggctacccagatggatatgcggactacgaggatgctgctggggctcctcaacatattgcgcatccagaatgcggcgctcaggtacgagtatcttctaatgcccacggagctcacaacatggccactgggtatggataccgtgggtgacttgctcatcgcgcaggagaatgctgcactgataggattaatgcagctagggccctcatctgatttcacgagcaggcatgtggtgaaagacatacctgtgaacttgctgctcgatggcgaggattgggagtttgagattcctgtgcaagctggcatgtccagcttcccttccagctggtctcgcgtccgtattcggcacctggagatgcactttgtgaaggaggccagcggtattggtggtgagattatccaccagcctaccacccagactgggaccgtttacatccttctgcagggttccactatcttccatgaccgcagaagagaccaggtgttgccttttcaggccgctgctccgctcaactaccattacgcgtaccgcctcgacaccggcgactccactctcacaaacgaaccctctgaacagtttgccaacaagttcatgcagatgacacccttcacccgttggaggcttcgtctgtctgcgtccgcaaaagagaatgcaggattagcctttcccacggctacagcacttgactccactacccagattgtcatcactttccatgttacggccatcagacaaattgactggcggcacgacgaagag

SEQ ID NO: 314 - DNA, 2601 bp, Artificial Sequence
  Synthetic
atggctctcgtggattacggcaagcttttcgaggatctgaaccagataagcatgggtgtactggatcgggtagagttttcagaggtgatggtgatccacaggatgtatgtgaggctagctgatctgaatgtggggcagctcgagggagccgagaaagtgaagcggttgtatgtgtttgcggacgtggtggagctaccagtcgtggaatggcggtggccgccgcaaataccaggatcggtgacggtgatcatattgtgtcgtcttcttcaatggccaactgatgggaggcagtcggacaccgagctccacctgacattcatgaagttgcatgccatacaacgagaggaaaatcggtgggagataaccgcagcagatggcatgaactggggagtttacatacacgcagaggaagtacaggttggcgtgctgacaatgtcatggtcttcggtacttagagtttcggcacttcgctctgttataacctccggctttcgcgccgttagtgtgtttgaggtaccgggaagtgtaaggtccacccttggagctactttaaggcccgatcacgccttatatagtacaactatgcaagccacacccaacgcatcgcatattagtgcttttaaccttcgcatagtttccccgtcggcatatcgtgtttgtcctctccaaaatgacacagatacctacttaggtattccagcagacgtggcggcagttcttccagtagacgtggtgactgatcctaacatcttgctgggcatgcagacaacggtacacattgcggagctagtcaaggcatgtcatccgtcacccgatgttgtgagcgctgtaggggagcacctgaactggctcaacaaactcttactcccacttaaggaatcgactcagttgcaaggaagcgagtcgtacaaggagtgccttgcactcttgggtcgtgttcacgctgcgatgaagatggtgagaattggcttagtagtgccccagctgcaatacagaatgtacggtagcctcatcaaccaaatggcccaagtagcacaaaactacgaccgagaattcaagcaattcaaattattcatcatccaaaatcaaatccttggcagctatttgctgcagcagaacagggcatttgctgagagggagctgcagatggagagctttcatgctgctgtcatttctcaaagaagggaggagttggacaatacattcgcaaagatggaccgattgagcgggcaaatggaggcagagagtagtgcaatggagcaagccaaaaaggaaatggacgaaggattgaggcagttccagaataggcaagttgcgaacgccctctttgccgttcttagcgctgtagctcagattgggcttgcattccttacggctggtgcaacggctcctggagctgtggcgtcggcggggcaagctgtgagcatagcaggtcaggcggcgcaaggtctgcgaagggtggtggaaattctagagcagctggaggctgtgatggaggttgtggctgctgtgaaggacctcgtggattcattggaacaggtaggtcagattgtggacgcaccggtgatgccggaattgccctcagaggcggactggtccatttttgtgaacgaggtggaggccgtggcagagggcatgccaacggaagtctcggaggttccggtgtggatgggccggtgcaagtccgtggctgcactgggtcgggagatgagcatcacggcagtacagatgtcggagctgcagtatgacatctgggtgcaaggcatgatgcgggatatggctcgaagccaggcagacaggctggccgcaattcaacccgcggaccttaccaactatttggagatggctacccagatggatatgcggactacgaggatgctgctggggctcctcaacatattgcgcatccagaatgcggcgctcaggtacgagtatcttctaatgcccacggagctcacaacatggccactgggtatggataccgtgggtgacttgctcatcgcgcaggagaatgctgcactgataggattaatgcagctagggccctcatctgatttcacgagcaggcatgtggtgaaagacatacctgtgaacttgctgctcgatggcgaggattgggagtttgagattcctgtgcaagctggcatgtccagcttcccttccagctggtctcgcgtccgtattcggcacctggagatgcactttgtgaaggaggccagcggtattggtggtgagattatccaccagcctaccacccagactgggaccgtttacatccttctgcagggttccactatcttccatgaccgcagaagagaccaggtgttgccttttcaggccgctgctccgctcaactaccattacgcgtaccgcctcgacaccggcgactccactctcacaaacgaaccctctgaacagtttgccaacaagttcatgcagatgacacccttcacccgttggaggcttcgtctgtctgcgtccgcaaaagagaatgcaggattagcctttcccacggctacagcacttgactccactacccagattgtcatcactttccatgttacggccatcagacaaattgactggcggcacgacgaagag

SEQ ID NO: 315 - DNA, 2601 bp, Artificial Sequence
  Synthetic
atggctctcgtggattacggcaagcttttcgaggatctgaaccagataagcatgggtgtactggatcgggtagagttttcagaggtgatggtgatccacaggatgtatgtgaggctagctgatctgaatgtggggcagctcgagggagccgagaaagtgaagcggttgtatgtgtttgcggacgtggtggagctaccagtcgtggaatggcggtggccgccgcaaataccaggatcggtgacggtgatcatattgtgtcgtcttcttcaatggccaactgatgggaggcagtcggacaccgagctccacctgacattcatgaagttgcatgccatacaacgagaggaaaatcggtgggagataaccgcagcagatggcatgaactggggagtttacatacacgcagaggaagtacaggttggcgtgctgacaatgtcatggtcttcggtacttagagtttcggcacttcgctctgttataacctccggctttcgcgccgttagtgtgtttgaggtaccgggaagtgtaaggtccacccttggagctactttaaggcccgatcacgccttatatagtacaactatgcaagccacacccaacgcatcgcatattagtgcttttaaccttcgcatagtttccccgtcggcatatcgtgtttgtcctctccaaaatgacacagatacctacttaggtattccagcagacgtggcggcagttcttccagtagacgtggtgactgatcctaacatcttgctgggcatgcagacaacggtacacattgcggagctagtcaaggcatgtcatccgtcacccgatgttgtgagcgctgtaggggagcacctgaactggctcaacaaactcttactcccacttaaggaatcgactcagttgcaaggaagcgagtcgtacaaggagtgccttgcactcttgggtcgtgttcacgctgcgatgaagatggtgagaattggcttagtagtgccccagctgcaatacagaatgtacggtagcctcatcaaccaaatggcccaagtagcacaaaactacgaccgagaattcaagcaattcaaattattcatcatccaaaatcaaatccttggcagctatttgctgcagcagaacagggcatttgctgagagggagctgcagatggagagctttcatgctgctgtcatttctcaaagaagggaggagttggacaatacattcgcaaagatggaccgattgagcgggcaaatggaggcagagagtagtgcaatggagcaagccaaaaaggaaatggacgaaggattgaggcagttccagaataggcaagttgcgaacgccctctttgccgttcttagcgctgtagctcagattgggcttgcattccttacggctggtgcaacggctcctggagctgtggcgtcggcggggcaagctgtgagcatagcaggtcaggcggcgcaaggtctgcgaagggtggtggaaattctagagcagctggaggctgtgatggaggttgtggctgctgtgaaggacctcgtggattcattggaacaggtaggtcagattgtggacgcaccggtgatgccggaattgccctcagaggcggactggtccatttttgtgaacgaggtggaggccgtggcagagggcatgccaacggaagtctcggaggttccggtgtggatggtcaagtgcaagaatgtggctgcactgggtcgggagatgagcatcacggcagtacagatgtcggagctgcagtatgacatctgggtgcaaggcatgatgcgggatatggctcgaagccaggcagacaggctggccgcaattcaacccgcggaccttaccaactatttggagatggctacccagatggatatgcggactacgaggatgctgctggggctcctcaacatattgcgcatccagaatgcggcgctcaggtacgagtatcttctaatgcccacggagctcacaacatggccactgggtatggataccgtgggtgacttgctcatcgcgcaggagaatgctgcactgataggattaatgcagctagggccctcatctgatttcacgagcaggcatgtggtgaaagacatacctgtgaacttgctgctcgatggcgaggattgggagtttgagattcctgtgcaagctggcatgtccagcttcccttccagctggtctcgcgtccgtattcggcacctggagatgcactttgtgaaggaggccagcggtattggtggtgagattatccaccagcctaccacccagactgggaccgtttacatccttctgcagggttccactatcttccatgaccgcagaagagaccaggtgttgccttttcaggccgctgctccgctcaactaccattacgcgtaccgcctcgacaccggcgactccactctcacaaacgaaccctctgaacagtttgccaacaagttcatgcagatgacacccttcacccgttggaggcttcgtctgtctgcgtccgcaaaagagaatgcaggattagcctttcccacggctacagcacttgactccactacccagattgtcatcactttccatgttacggccatcagacaaattgactggcggcacgacgaagag

SEQ ID NO: 316 - DNA, 2601 bp, Artificial Sequence
  Synthetic
atggctctcgtggattacggcaagcttttcgaggatctgaaccagataagcatgggtgtactggatcgggtagagttttcagaggtgatggtgatccacaggatgtatgtgaggctagctgatctgaatgtggggcagctcgagggagccgagaaagtgaagcggttgtatgtgtttgcggacgtggtggagctaccagtcgtggaatggcggtggccgccgcaaataccaggatcggtgacggtgatcatattgtgtcgtcttcttcaatggccaactgatgggaggcagtcggacaccgagctccacctgacattcatgaagttgcatgccatacaacgagaggaaaatcggtgggagataaccgcagcagatggcatgaactggggagtttacatacacgcagaggaagtacaggttggcgtgctgacaatgtcatggtcttcggtacttagagtttcggcacttcgctctgttataacctccggctttcgcgccgttagtgtgtttgaggtaccgggaagtgtaaggtccacccttggagctactttaaggcccgatcacgccttatatagtacaactatgcaagccacacccaacgcatcgcatattagtgcttttaaccttcgcatagtttccccgtcggcatatcgtgtttgtcctctccaaaatgacacagatacctacttaggtattccagcagacgtggcggcagttcttccagtagacgtggtgactgatcctaacatcttgctgggcatgcagacaacggtacacattgcggagctagtcaaggcatgtcatccgtcacccgatgttgtgagcgctgtaggggagcacctgaactggctcaacaaactcttactcccacttaaggaatcgactcagttgcaaggaagcgagtcgtacaaggagtgccttgcactcttgggtcgtgttcacgctgcgatgaagatggtgagaattggcttagtagtgccccagctgcaatacagaatgtacggtagcctcatcaaccaaatggcccaagtagcacaaaactacgaccgagaattcaagcaattcaaattattcatcatccaaaatcaaatccttggcagctatttgctgcagcagaacagggcatttgctgagagggagctgcagatggagagctttcatgctgctgtcatttctcaaagaagggaggagttggacaatacattcgcaaagatggaccgattgagcgggcaaatggaggcagagagtagtgcaatggagcaagccaaaaaggaaatggacgaaggattgaggcagttccagaataggcaagttgcgaacgccctctttgccgttcttagcgctgtagctcagattgggcttgcattccttacggctggtgcaacggctcctggagctgtggcgtcggcggggcaagctgtgagcatagcaggtcaggcggcgcaaggtctgcgaagggtggtggaaattctagagcagctggaggctgtgatggaggttgtggctgctgtgaaggacctcgtggattcattggaacaggtaggtcagattgtggacgcaccggtgatgccggaattgccctcagaggcggactggtccatttttgtgaacgaggtggaggccgtggcagagggcatgccaacggaagtctcggaggttccggtgtggatggtcaagtgcaagagcgtggctgcactgggtcgggagatgagcatcacggcagtacagatgtcggagctgcagtatgacatctgggtgcaaggcatgatgcgggatatggctcgaagccaggcagacaggctggccgcaattcaacccgcggaccttaccaactatttggagatggctacccagatggatatgcggactacgaggatgctgctggggctcctcaacatattgcgcatccagaatgcggcgctcaggtacgagtatcttctaatgcccacggagctcacaacatggccactgggtatggataccgtgggtgacttgctcatcgcgcaggagaatgctgcactgataggattaatgcagctagggccctcatctgatttcacgagcaggcatgtggtgaaagacatacctgtgaacttgctgctcgatggcgaggattgggagtttgagattcctgtgcaagctggcatgtccagcttcccttccagctggtctcgcgtccgtattcggcacctggagatgcactttgtgaaggaggccagcggtattggtggtgagattatccaccagcctaccacccagactgggaccgtttacatccttctgcagggttccactatcttccatgaccgcagaagagaccaggtgttgccttttcaggccgctgctccgctcaactaccattacgcgtaccgcctcgacaccggcgactccactctcacaaacgaaccctctgaacagtttgccaacaagttcatgcagatgacacccttcacccgttggaggcttcgtctgtctgcgtccgcaaaagagaatgcaggattagcctttcccacggctacagcacttgactccactacccagattgtcatcactttccatgttacggccatcagacaaattgactggcggcacgacgaagag

SEQ ID NO: 317 - DNA, 2601 bp, Artificial Sequence
  Synthetic
atggctctcgtggattacggcaagcttttcgaggatctgaaccagataagcatgggtgtactggatcgggtagagttttcagaggtgatggtgatccacaggatgtatgtgaggctagctgatctgaatgtggggcagctcgagggagccgagaaagtgaagcggttgtatgtgtttgcggacgtggtggagctaccagtcgtggaatggcggtggccgccgcaaataccaggatcggtgacggtgatcatattgtgtcgtcttcttcaatggccaactgatgggaggcagtcggacaccgagctccacctgacattcatgaagttgcatgccatacaacgagaggaaaatcggtgggagataaccgcagcagatggcatgaactggggagtttacatacacgcagaggaagtacaggttggcgtgctgacaatgtcatggtcttcggtacttagagtttcggcacttcgctctgttataacctccggctttcgcgccgttagtgtgtttgaggtaccgggaagtgtaaggtccacccttggagctactttaaggcccgatcacgccttatatagtacaactatgcaagccacacccaacgcatcgcatattagtgcttttaaccttcgcatagtttccccgtcggcatatcgtgtttgtcctctccaaaatgacacagatacctacttaggtattccagcagacgtggcggcagttcttccagtagacgtggtgactgatcctaacatcttgctgggcatgcagacaacggtacacattgcggagctagtcaaggcatgtcatccgtcacccgatgttgtgagcgctgtaggggagcacctgaactggctcaacaaactcttactcccacttaaggaatcgactcagttgcaaggaagcgagtcgtacaaggagtgccttgcactcttgggtcgtgttcacgctgcgatgaagatggtgagaattggcttagtagtgccccagctgcaatacagaatgtacggtagcctcatcaaccaaatggcccaagtagcacaaaactacgaccgagaattcaagcaattcaaattattcatcatccaaaatcaaatccttggcagctatttgctgcagcagaacagggcatttgctgagagggagctgcagatggagagctttcatgctgctgtcatttctcaaagaagggaggagttggacaatacattcgcaaagatggaccgattgagcgggcaaatggaggcagagagtagtgcaatggagcaagccaaaaaggaaatggacgaaggattgaggcagttccagaataggcaagttgcgaacgccctctttgccgttcttagcgctgtagctcagattgggcttgcattccttacggctggtgcaacggctcctggagctgtggcgtcggcggggcaagctgtgagcatagcaggtcaggcggcgcaaggtctgcgaagggtggtggaaattctagagcagctggaggctgtgatggaggttgtggctgctgtgaaggacctcgtggattcattggaacaggtaggtcagattgtggacgcaccggtgatgccggaattgccctcagaggcggactggtccatttttgtgaacgaggtggaggccgtggcagagggcatgccaacggaagtctcggaggttccggtgtggatggtcaggtgcaagaatgtggctgcactgggtcgggagatgagcatcacggcagtacagatgtcggagctgcagtatgacatctgggtgcaaggcatgatgcgggatatggctcgaagccaggcagacaggctggccgcaattcaacccgcggaccttaccaactatttggagatggctacccagatggatatgcggactacgaggatgctgctggggctcctcaacatattgcgcatccagaatgcggcgctcaggtacgagtatcttctaatgcccacggagctcacaacatggccactgggtatggataccgtgggtgacttgctcatcgcgcaggagaatgctgcactgataggattaatgcagctagggccctcatctgatttcacgagcaggcatgtggtgaaagacatacctgtgaacttgctgctcgatggcgaggattgggagtttgagattcctgtgcaagctggcatgtccagcttcccttccagctggtctcgcgtccgtattcggcacctggagatgcactttgtgaaggaggccagcggtattggtggtgagattatccaccagcctaccacccagactgggaccgtttacatccttctgcagggttccactatcttccatgaccgcagaagagaccaggtgttgccttttcaggccgctgctccgctcaactaccattacgcgtaccgcctcgacaccggcgactccactctcacaaacgaaccctctgaacagtttgccaacaagttcatgcagatgacacccttcacccgttggaggcttcgtctgtctgcgtccgcaaaagagaatgcaggattagcctttcccacggctacagcacttgactccactacccagattgtcatcactttccatgttacggccatcagacaaattgactggcggcacgacgaagag

SEQ ID NO: 318 - DNA, 2601 bp, Artificial Sequence
  Synthetic
atggctctcgtggattacggcaagcttttcgaggatctgaaccagataagcatgggtgtactggatcgggtagagttttcagaggtgatggtgatccacaggatgtatgtgaggctagctgatctgaatgtggggcagctcgagggagccgagaaagtgaagcggttgtatgtgtttgcggacgtggtggagctaccagtcgtggaatggcggtggccgccgcaaataccaggatcggtgacggtgatcatattgtgtcgtcttcttcaatggccaactgatgggaggcagtcggacaccgagctccacctgacattcatgaagttgcatgccatacaacgagaggaaaatcggtgggagataaccgcagcagatggcatgaactggggagtttacatacacgcagaggaagtacaggttggcgtgctgacaatgtcatggtcttcggtacttagagtttcggcacttcgctctgttataacctccggctttcgcgccgttagtgtgtttgaggtaccgggaagtgtaaggtccacccttggagctactttaaggcccgatcacgccttatatagtacaactatgcaagccacacccaacgcatcgcatattagtgcttttaaccttcgcatagtttccccgtcggcatatcgtgtttgtcctctccaaaatgacacagatacctacttaggtattccagcagacgtggcggcagttcttccagtagacgtggtgactgatcctaacatcttgctgggcatgcagacaacggtacacattgcggagctagtcaaggcatgtcatccgtcacccgatgttgtgagcgctgtaggggagcacctgaactggctcaacaaactcttactcccacttaaggaatcgactcagttgcaaggaagcgagtcgtacaaggagtgccttgcactcttgggtcgtgttcacgctgcgatgaagatggtgagaattggcttagtagtgccccagctgcaatacagaatgtacggtagcctcatcaaccaaatggcccaagtagcacaaaactacgaccgagaattcaagcaattcaaattattcatcatccaaaatcaaatccttggcagctatttgctgcagcagaacagggcatttgctgagagggagctgcagatggagagctttcatgctgctgtcatttctcaaagaagggaggagttggacaatacattcgcaaagatggaccgattgagcgggcaaatggaggcagagagtagtgcaatggagcaagccaaaaaggaaatggacgaaggattgaggcagttccagaataggcaagttgcgaacgccctctttgccgttcttagcgctgtagctcagattgggcttgcattccttacggctggtgcaacggctcctggagctgtggcgtcggcggggcaagctgtgagcatagcaggtcaggcggcgcaaggtctgcgaagggtggtggaaattctagagcagctggaggctgtgatggaggttgtggctgctgtgaaggacctcgtggattcattggaacaggtaggtcagattgtggacgcaccggtgatgccggaattgccctcagaggcggactggtccatttttgtgaacgaggtggaggccgtggcagagggcatgccaacggaagtctcggaggttccggtgtggcaggccaggtgcaagcatgtggctgcactgggtcgggagatgagcatcacggcagtacagatgtcggagctgcagtatgacatctgggtgcaaggcatgatgcgggatatggctcgaagccaggcagacaggctggccgcaattcaacccgcggaccttaccaactatttggagatggctacccagatggatatgcggactacgaggatgctgctggggctcctcaacatattgcgcatccagaatgcggcgctcaggtacgagtatcttctaatgcccacggagctcacaacatggccactgggtatggataccgtgggtgacttgctcatcgcgcaggagaatgctgcactgataggattaatgcagctagggccctcatctgatttcacgagcaggcatgtggtgaaagacatacctgtgaacttgctgctcgatggcgaggattgggagtttgagattcctgtgcaagctggcatgtccagcttcccttccagctggtctcgcgtccgtattcggcacctggagatgcactttgtgaaggaggccagcggtattggtggtgagattatccaccagcctaccacccagactgggaccgtttacatccttctgcagggttccactatcttccatgaccgcagaagagaccaggtgttgccttttcaggccgctgctccgctcaactaccattacgcgtaccgcctcgacaccggcgactccactctcacaaacgaaccctctgaacagtttgccaacaagttcatgcagatgacacccttcacccgttggaggcttcgtctgtctgcgtccgcaaaagagaatgcaggattagcctttcccacggctacagcacttgactccactacccagattgtcatcactttccatgttacggccatcagacaaattgactggcggcacgacgaagag

SEQ ID NO: 319 - DNA, 2601 bp, Artificial Sequence
  Synthetic
atggctctcgtggattacggcaagcttttcgaggatctgaaccagataagcatgggtgtactggatcgggtagagttttcagaggtgatggtgatccacaggatgtatgtgaggctagctgatctgaatgtggggcagctcgagggagccgagaaagtgaagcggttgtatgtgtttgcggacgtggtggagctaccagtcgtggaatggcggtggccgccgcaaataccaggatcggtgacggtgatcatattgtgtcgtcttcttcaatggccaactgatgggaggcagtcggacaccgagctccacctgacattcatgaagttgcatgccatacaacgagaggaaaatcggtgggagataaccgcagcagatggcatgaactggggagtttacatacacgcagaggaagtacaggttggcgtgctgacaatgtcatggtcttcggtacttagagtttcggcacttcgctctgttataacctccggctttcgcgccgttagtgtgtttgaggtaccgggaagtgtaaggtccacccttggagctactttaaggcccgatcacgccttatatagtacaactatgcaagccacacccaacgcatcgcatattagtgcttttaaccttcgcatagtttccccgtcggcatatcgtgtttgtcctctccaaaatgacacagatacctacttaggtattccagcagacgtggcggcagttcttccagtagacgtggtgactgatcctaacatcttgctgggcatgcagacaacggtacacattgcggagctagtcaaggcatgtcatccgtcacccgatgttgtgagcgctgtaggggagcacctgaactggctcaacaaactcttactcccacttaaggaatcgactcagttgcaaggaagcgagtcgtacaaggagtgccttgcactcttgggtcgtgttcacgctgcgatgaagatggtgagaattggcttagtagtgccccagctgcaatacagaatgtacggtagcctcatcaaccaaatggcccaagtagcacaaaactacgaccgagaattcaagcaattcaaattattcatcatccaaaatcaaatccttggcagctatttgctgcagcagaacagggcatttgctgagagggagctgcagatggagagctttcatgctgctgtcatttctcaaagaagggaggagttggacaatacattcgcaaagatggaccgattgagcgggcaaatggaggcagagagtagtgcaatggagcaagccaaaaaggaaatggacgaaggattgaggcagttccagaataggcaagttgcgaacgccctctttgccgttcttagcgctgtagctcagattgggcttgcattccttacggctggtgcaacggctcctggagctgtggcgtcggcggggcaagctgtgagcatagcaggtcaggcggcgcaaggtctgcgaagggtggtggaaattctagagcagctggaggctgtgatggaggttgtggctgctgtgaatgacctcgtggattcattggaacaggtaggtcagattgtggacgcaccggtgatgccggaattgccctcagaggcggactggtccatttttgtgaacgaggtggaggccgtggcagagggcatgccaacggaagtctcggaggttccggtgtggcaggccaggtgcaagaatgtggctgcactgggtcgggagatgagcatcacggcagtacagatgtcggagctgcagtatgacatctgggtgcaaggcatgatgcgggatatggctcgaagccaggcagacaggctggccgcaattcaacccgcggaccttaccaactatttggagatggctacccagatggatatgcggactacgaggatgctgctggggctcctcaacatattgcgcatccagaatgcggcgctcaggtacgagtatcttctaatgcccacggagctcacaacatggccactgggtatggataccgtgggtgacttgctcatcgcgcaggagaatgctgcactgataggattaatgcagctagggccctcatctgatttcacgagcaggcatgtggtgaaagacatacctgtgaacttgctgctcgatggcgaggattgggagtttgagattcctgtgcaagctggcatgtccagcttcccttccagctggtctcgcgtccgtattcggcacctggagatgcactttgtgaaggaggccagcggtattggtggtgagattatccaccagcctaccacccagactgggaccgtttacatccttctgcagggttccactatcttccatgaccgcagaagagaccaggtgttgccttttcaggccgctgctccgctcaactaccattacgcgtaccgcctcgacaccggcgactccactctcacaaacgaaccctctgaacagtttgccaacaagttcatgcagatgacacccttcacccgttggaggcttcgtctgtctgcgtccgcaaaagagaatgcaggattagcctttcccacggctacagcacttgactccactacccagattgtcatcactttccatgttacggccatcagacaaattgactggcggcacgacgaagag

SEQ ID NO: 320 - DNA, 2601 bp, Artificial Sequence
  Synthetic
atggctctcgtggattacggcaagcttttcgaggatctgaaccagataagcatgggtgtactggatcgggtagagttttcagaggtgatggtgatccacaggatgtatgtgaggctagctgatctgaatgtggggcagctcgagggagccgagaaagtgaagcggttgtatgtgtttgcggacgtggtggagctaccagtcgtggaatggcggtggccgccgcaaataccaggatcggtgacggtgatcatattgtgtcgtcttcttcaatggccaactgatgggaggcagtcggacaccgagctccacctgacattcatgaagttgcatgccatacaacgagaggaaaatcggtgggagataaccgcagcagatggcatgaactggggagtttacatacacgcagaggaagtacaggttggcgtgctgacaatgtcatggtcttcggtacttagagtttcggcacttcgctctgttataacctccggctttcgcgccgttagtgtgtttgaggtaccgggaagtgtaaggtccacccttggagctactttaaggcccgatcacgccttatatagtacaactatgcaagccacacccaacgcatcgcatattagtgcttttaaccttcgcatagtttccccgtcggcatatcgtgtttgtcctctccaaaatgacacagatacctacttaggtattccagcagacgtggcggcagttcttccagtagacgtggtgactgatcctaacatcttgctgggcatgcagacaacggtacacattgcggagctagtcaaggcatgtcatccgtcacccgatgttgtgagcgctgtaggggagcacctgaactggctcaacaaactcttactcccacttaaggaatcgactcagttgcaaggaagcgagtcgtacaaggagtgccttgcactcttgggtcgtgttcacgctgcgatgaagatggtgagaattggcttagtagtgccccagctgcaatacagaatgtacggtagcctcatcaaccaaatggcccaagtagcacaaaactacgaccgagaattcaagcaattcaaattattcatcatccaaaatcaaatccttggcagctatttgctgcagcagaacagggcatttgctgagagggagctgcagatggagagctttcatgctgctgtcatttctcaaagaagggaggagttggacaatacattcgcaaagatggaccgattgagcgggcaaatggaggcagagagtagtgcaatggagcaagccaaaaaggaaatggacgaaggattgaggcagttccagaataggcaagttgcgaacgccctctttgccgttcttagcgctgtagctcagattgggcttgcattccttacggctggtgcaacggctcctggagctgtggcgtcggcggggcaagctgtgagcatagcaggtcaggcggcgcaaggtctgcgaagggtggtggaaattctagagcagctggaggctgtgatggaggttgtggctgctgtgaaggacctcgtggattcattggaacaggtaggtcagattgtggacgcaccggtgatgccggaattgccctcagaggcggactggtccatttttgtgaacgaggtggaggccgtggcagagggcatgccaacggaagtctcggaggttccggtgtggcagggcaggtgcaagaatgtggctgcactgggtcgggagatgagcatcacggcagtacagatgtcggagctgcagtatgacatctgggtgcaaggcatgatgcgggatatggctcgaagccaggcagacaggctggccgcaattcaacccgcggaccttaccaactatttggagatggctacccagatggatatgcggactacgaggatgctgctggggctcctcaacatattgcgcatccagaatgcggcgctcaggtacgagtatcttctaatgcccacggagctcacaacatggccactgggtatggataccgtgggtgacttgctcatcgcgcaggagaatgctgcactgataggattaatgcagctagggccctcatctgatttcacgagcaggcatgtggtgaaagacatacctgtgaacttgctgctcgatggcgaggattgggagtttgagattcctgtgcaagctggcatgtccagcttcccttccagctggtctcgcgtccgtattcggcacctggagatgcactttgtgaaggaggccagcggtattggtggtgagattatccaccagcctaccacccagactgggaccgtttacatccttctgcagggttccactatcttccatgaccgcagaagagaccaggtgttgccttttcaggccgctgctccgctcaactaccattacgcgtaccgcctcgacaccggcgactccactctcacaaacgaaccctctgaacagtttgccaacaagttcatgcagatgacacccttcacccgttggaggcttcgtctgtctgcgtccgcaaaagagaatgcaggattagcctttcccacggctacagcacttgactccactacccagattgtcatcactttccatgttacggccatcagacaaattgactggcggcacgacgaagag

SEQ ID NO: 321 - DNA, 2601 bp, Artificial Sequence
  Synthetic
atggctctcgtggattacggcaagcttttcgaggatctgaaccagataagcatgggtgtactggatcgggtagagttttcagaggtgatggtgatccacaggatgtatgtgaggctagctgatctgaatgtggggcagctcgagggagccgagaaagtgaagcggttgtatgtgtttgcggacgtggtggagctaccagtcgtggaatggcggtggccgccgcaaataccaggatcggtgacggtgatcatattgtgtcgtcttcttcaatggccaactgatgggaggcagtcggacaccgagctccacctgacattcatgaagttgcatgccatacaacgagaggaaaatcggtgggagataaccgcagcagatggcatgaactggggagtttacatacacgcagaggaagtacaggttggcgtgctgacaatgtcatggtcttcggtacttagagtttcggcacttcgctctgttataacctccggctttcgcgccgttagtgtgtttgaggtaccgggaagtgtaaggtccacccttggagctactttaaggcccgatcacgccttatatagtacaactatgcaagccacacccaacgcatcgcatattagtgcttttaaccttcgcatagtttccccgtcggcatatcgtgtttgtcctctccaaaatgacacagatacctacttaggtattccagcagacgtggcggcagttcttccagtagacgtggtgactgatcctaacatcttgctgggcatgcagacaacggtacacattgcggagctagtcaaggcatgtcatccgtcacccgatgttgtgagcgctgtaggggagcacctgaactggctcaacaaactcttactcccacttaaggaatcgactcagttgcaaggaagcgagtcgtacaaggagtgccttgcactcttgggtcgtgttcacgctgcgatgaagatggtgagaattggcttagtagtgccccagctgcaatacagaatgtacggtagcctcatcaaccaaatggcccaagtagcacaaaactacgaccgagaattcaagcaattcaaattattcatcatccaaaatcaaatccttggcagctatttgctgcagcagaacagggcatttgctgagagggagctgcagatggagagctttcatgctgctgtcatttctcaaagaagggaggagttggacaatacattcgcaaagatggaccgattgagcgggcaaatggaggcagagagtagtgcaatggagcaagccaaaaaggaaatggacgaaggattgaggcagttccagaataggcaagttgcgaacgccctctttgccgttcttagcgctgtagctcagattgggcttgcattccttacggctggtgcaacggctcctggagctgtggcgtcggcggggcaagctgtgagcatagcaggtcaggcggcgcaaggtctgcgaagggtggtggaaattctagagcagctggaggctgtgatggaggttgtggctgctgtgaaggacctcgtggattcattggaacaggtaggtcagattgtggacgcaccggtgatgccggaattgccctcagaggcggactggtccatttttgtgaacgaggtggaggccgtggcagagggcatgccaacggaagtctcggaggttccggtgtggcaggtcaggtgcaagtccgtggctgcactgggtcgggagatgagcatcacggcagtacagatgtcggagctgcagtatgacatctgggtgcaaggcatgatgcgggatatggctcgaagccaggcagacaggctggccgcaattcaacccgcggaccttaccaactatttggagatggctacccagatggatatgcggactacgaggatgctgctggggctcctcaacatattgcgcatccagaatgcggcgctcaggtacgagtatcttctaatgcccacggagctcacaacatggccactgggtatggataccgtgggtgacttgctcatcgcgcaggagaatgctgcactgataggattaatgcagctagggccctcatctgatttcacgagcaggcatgtggtgaaagacatacctgtgaacttgctgctcgatggcgaggattgggagtttgagattcctgtgcaagctggcatgtccagcttcccttccagctggtctcgcgtccgtattcggcacctggagatgcactttgtgaaggaggccagcggtattggtggtgagattatccaccagcctaccacccagactgggaccgtttacatccttctgcagggttccactatcttccatgaccgcagaagagaccaggtgttgccttttcaggccgctgctccgctcaactaccattacgcgtaccgcctcgacaccggcgactccactctcacaaacgaaccctctgaacagtttgccaacaagttcatgcagatgacacccttcacccgttggaggcttcgtctgtctgcgtccgcaaaagagaatgcaggattagcctttcccacggctacagcacttgactccactacccagattgtcatcactttccatgttacggccatcagacaaattgactggcggcacgacgaagag

SEQ ID NO: 322 - DNA, 2601 bp, Artificial Sequence
  Synthetic
atggctctcgtggattacggcaagcttttcgaggatctgaaccagataagcatgggtgtactggatcgggtagagttttcagaggtgatggtgatccacaggatgtatgtgaggctagctgatctgaatgtggggcagctcgagggagccgagaaagtgaagcggttgtatgtgtttgcggacgtggtggagctaccagtcgtggaatggcggtggccgccgcaaataccaggatcggtgacggtgatcatattgtgtcgtcttcttcaatggccaactgatgggaggcagtcggacaccgagctccacctgacattcatgaagttgcatgccatacaacgagaggaaaatcggtgggagataaccgcagcagatggcatgaactggggagtttacatacacgcagaggaagtacaggttggcgtgctgacaatgtcatggtcttcggtacttagagtttcggcacttcgctctgttataacctccggctttcgcgccgttagtgtgtttgaggtaccgggaagtgtaaggtccacccttggagctactttaaggcccgatcacgccttatatagtacaactatgcaagccacacccaacgcatcgcatattagtgcttttaaccttcgcatagtttccccgtcggcatatcgtgtttgtcctctccaaaatgacacagatacctacttaggtattccagcagacgtggcggcagttcttccagtagacgtggtgactgatcctaacatcttgctgggcatgcagacaacggtacacattgcggagctagtcaaggcatgtcatccgtcacccgatgttgtgagcgctgtaggggagcacctgaactggctcaacaaactcttactcccacttaaggaatcgactcagttgcaaggaagcgagtcgtacaaggagtgccttgcactcttgggtcgtgttcacgctgcgatgaagatggtgagaattggcttagtagtgccccagctgcaatacagaatgtacggtagcctcatcaaccaaatggcccaagtagcacaaaactacgaccgagaattcaagcaattcaaattattcatcatccaaaatcaaatccttggcagctatttgctgcagcagaacagggcatttgctgagagggagctgcagatggagagctttcatgctgctgtcatttctcaaagaagggaggagttggacaatacattcgcaaagatggaccgattgagcgggcaaatggaggcagagagtagtgcaatggagcaagccaaaaaggaaatggacgaaggattgaggcagttccagaataggcaagttgcgaacgccctctttgccgttcttagcgctgtagctcagattgggcttgcattccttacggctggtgcaacggctcctggagctgtggcgtcggcggggcaagctgtgagcatagcaggtcaggcggcgcaaggtctgcgaagggtggtggaaattctagagcagctggaggctgtgatggaggttgtggctgctgtgaaggacctcgtggattcattggaacaggtaggtcagattgtggacgcaccggtgatgccggaattgccctcagaggcggactggtccatttttgtgaacgaggtggaggccgtggcagagggcatgccaacggaagtctcggaggttccggtgtggagggccaggtgcaagaatgtggctgcactgggtcgggagatgagcatcgcggcagtacagatgtcggagctgcagtatgacatctgggtgcaaggcatgatgcgggatatggctcgaagccaggcagacaggctggccgcaattcaacccgcggaccttaccaactatttggagatggctacccagatggatatgcggactacgaggatgctgctggggctcctcaacatattgcgcatccagaatgcggcgctcaggtacgagtatcttctaatgcccacggagctcacaacatggccactgggtatggataccgtgggtgacttgctcatcgcgcaggagaatgctgcactgataggattaatgcagctagggccctcatctgatttcacgagcaggcatgtggtgaaagacatacctgtgaacttgctgctcgatggcgaggattgggagtttgagattcctgtgcaagctggcatgtccagcttcccttccagctggtctcgcgtccgtattcggcacctggagatgcactttgtgaaggaggccagcggtattggtggtgagattatccaccagcctaccacccagactgggaccgtttacatccttctgcagggttccactatcttccatgaccgcagaagagaccaggtgttgccttttcaggccgctgctccgctcaactaccattacgcgtaccgcctcgacaccggcgactccactctcacaaacgaaccctctgaacagtttgccaacaagttcatgcagatgacacccttcacccgttggaggcttcgtctgtctgcgtccgcaaaagagaatgcaggattagcctttcccacggctacagcacttgactccactacccagattgtcatcactttccatgttacggccatcagacaaattgactggcggcacgacgaagag

SEQ ID NO: 323 - DNA, 2601 bp, Artificial Sequence
  Synthetic
atggctctcgtggattacggcaagcttttcgaggatctgaaccagataagcatgggtgtactggatcgggtagagttttcagaggtgatggtgatccacaggatgtatgtgaggctagctgatctgaatgtggggcagctcgagggagccgagaaagtgaagcggttgtatgtgtttgcggacgtggtggagctaccagtcgtggaatggcggtggccgccgcaaataccaggatcggtgacggtgatcatattgtgtcgtcttcttcaatggccaactgatgggaggcagtcggacaccgagctccacctgacattcatgaagttgcatgccatacaacgagaggaaaatcggtgggagataaccgcagcagatggcatgaactggggagtttacatacacgcagaggaagtacaggttggcgtgctgacaatgtcatggtcttcggtacttagagtttcggcacttcgctctgttataacctccggctttcgcgccgttagtgtgtttgaggtaccgggaagtgtaaggtccacccttggagctactttaaggcccgatcacgccttatatagtacaactatgcaagccacacccaacgcatcgcatattagtgcttttaaccttcgcatagtttccccgtcggcatatcgtgtttgtcctctccaaaatgacacagatacctacttaggtattccagcagacgtggcggcagttcttccagtagacgtggtgactgatcctaacatcttgctgggcatgcagacaacggtacacattgcggagctagtcaaggcatgtcatccgtcacccgatgttgtgagcgctgtaggggagcacctgaactggctcaacaaactcttactcccacttaaggaatcgactcagttgcaaggaagcgagtcgtacaaggagtgccttgcactcttgggtcgtgttcacgctgcgatgaagatggtgagaattggcttagtagtgccccagctgcaatacagaatgtacggtagcctcatcaaccaaatggcccaagtagcacaaaactacgaccgagaattcaagcaattcaaattattcatcatccaaaatcaaatccttggcagctatttgctgcagcagaacagggcatttgctgagagggagctgcagatggagagctttcatgctgctgtcatttctcaaagaagggaggagttggacaatacattcgcaaagatggaccgattgagcgggcaaatggaggcagagagtagtgcaatggagcaagccaaaaaggaaatggacgaaggattgaggcagttccagaataggcaagttgcgaacgccctctttgccgttcttagcgctgtagctcagattgggcttgcattccttacggctggtgcaacggctcctggagctgtggcgtcggcggggcaagctgtgagcatagcaggtcaggcggcgcaaggtctgcgaagggtggtggaaattctagagcagctggaggctgtgatggaggttgtggctgctgtgaaggacctcgtggattcattggaacaggtaggtcagattgtggacgcaccggtgatgccggaattgccctcagaggcggactggtccatttttgtgaacgaggtggaggccgtggcagagggcatgccaacggaagtctcggaggttccggtgtggaggggcaagtgcaagagcgtggctgcactgggtcgggagatgagcatcacggcagtacagatgtcggagctgcagtatgacatctgggtgcaaggcatgatgcgggatatggctcgaagccaggcagacaggctggccgcaattcaacccgcggaccttaccaactatttggagatggctacccagatggatatgcggactacgaggatgctgctggggctcctcaacatattgcgcatccagaatgcggcgctcaggtacgagtatcttctaatgcccacggagctcacaacatggccactgggtatggataccgtgggtgacttgctcatcgcgcaggagaatgctgcactgataggattaatgcagctagggccctcatctgatttcacgagcaggcatgtggtgaaagacatacctgtgaacttgctgctcgatggcgaggattgggagtttgagattcctgtgcaagctggcatgtccagcttcccttccagctggtctcgcgtccgtattcggcacctggagatgcactttgtgaaggaggccagcggtattggtggtgagattatccaccagcctaccacccagactgggaccgtttacatccttctgcagggttccactatcttccatgaccgcagaagagaccaggtgttgccttttcaggccgctgctccgctcaactaccattacgcgtaccgcctcgacaccggcgactccactctcacaaacgaaccctctgaacagtttgccaacaagttcatgcagatgacacccttcacccgttggaggcttcgtctgtctgcgtccgcaaaagagaatgcaggattagcctttcccacggctacagcacttgactccactacccagattgtcatcactttccatgttacggccatcagacaaattgactggcggcacgacgaagag

SEQ ID NO: 324 - DNA, 2601 bp, Artificial Sequence
  Synthetic
atggctctcgtggattacggcaagcttttcgaggatctgaaccagataagcatgggtgtactggatcgggtagagttttcagaggtgatggtgatccacaggatgtatgtgaggctagctgatctgaatgtggggcagctcgagggagccgagaaagtgaagcggttgtatgtgtttgcggacgtggtggagctaccagtcgtggaatggcggtggccgccgcaaataccaggatcggtgacggtgatcatattgtgtcgtcttcttcaatggccaactgatgggaggcagtcggacaccgagctccacctgacattcatgaagttgcatgccatacaacgagaggaaaatcggtgggagataaccgcagcagatggcatgaactggggagtttacatacacgcagaggaagtacaggttggcgtgctgacaatgtcatggtcttcggtacttagagtttcggcacttcgctctgttataacctccggctttcgcgccgttagtgtgtttgaggtaccgggaagtgtaaggtccacccttggagctactttaaggcccgatcacgccttatatagtacaactatgcaagccacacccaacgcatcgcatattagtgcttttaaccttcgcatagtttccccgtcggcatatcgtgtttgtcctctccaaaatgacacagatacctacttaggtattccagcagacgtggcggcagttcttccagtagacgtggtgactgatcctaacatcttgctgggcatgcagacaacggtacacattgcggagctagtcaaggcatgtcatccgtcacccgatgttgtgagcgctgtaggggagcacctgaactggctcaacaaactcttactcccacttaaggaatcgactcagttgcaaggaagcgagtcgtacaaggagtgccttgcactcttgggtcgtgttcacgctgcgatgaagatggtgagaattggcttagtagtgccccagctgcaatacagaatgtacggtagcctcatcaaccaaatggcccaagtagcacaaaactacgaccgagaattcaagcaattcaaattattcatcatccaaaatcaaatccttggcagctatttgctgcagcagaacagggcatttgctgagagggagctgcagatggagagctttcatgctgctgtcatttctcaaagaagggaggagttggacaatacattcgcaaagatggaccgattgagcgggcaaatggaggcagagagtagtgcaatggagcaagccaaaaaggaaatggacgaaggattgaggcagttccagaataggcaagttgcgaacgccctctttgccgttcttagcgctgtagctcagattgggcttgcattccttacggctggtgcaacggctcctggagctgtggcgtcggcggggcaagctgtgagcatagcaggtcaggcggcgcaaggtctgcgaagggtggtggaaattctagagcagctggaggctgtgatggaggttgtggctgctgtgaaggacctcgtggattcattggaacaggtaggtcagattgtggacgcaccggtgatgccggaattgccctcagaggcggactggtccatttttgtgaacgaggtggaggccgtggcagagggcatgccaacggaagtctcggaggttccggtgtggaggggcaggtgcaagaccgtggctgcactgggtcgggagatgagcatcacggcagtacagatgtcggagctgcagtatgacatctgggtgcaaggcatgatgcgggatatggctcgaagccaggcagacaggctggccgcaattcaacccgcggaccttaccaactatttggagatggctacccagatggatatgcggactacgaggatgctgctggggctcctcaacatattgcgcatccagaatgcggcgctcaggtacgagtatcttctaatgcccacggagctcacaacatggccactgggtatggataccgtgggtgacttgctcatcgcgcaggagaatgctgcactgataggattaatgcagctagggccctcatctgatttcacgagcaggcatgtggtgaaagacatacctgtgaacttgctgctcgatggcgaggattgggagtttgagattcctgtgcaagctggcatgtccagcttcccttccagctggtctcgcgtccgtattcggcacctggagatgcactttgtgaaggaggccagcggtattggtggtgagattatccaccagcctaccacccagactgggaccgtttacatccttctgcagggttccactatcttccatgaccgcagaagagaccaggtgttgccttttcaggccgctgctccgctcaactaccattacgcgtaccgcctcgacaccggcgactccactctcacaaacgaaccctctgaacagtttgccaacaagttcatgcagatgacacccttcacccgttggaggcttcgtctgtctgcgtccgcaaaagagaatgcaggattagcctttcccacggctacagcacttgactccactacccagattgtcatcactttccatgttacggccatcagacaaattgactggcggcacgacgaagag

SEQ ID NO: 325 - DNA, 2601 bp, Artificial Sequence
  Synthetic
atggctctcgtggattacggcaagcttttcgaggatctgaaccagataagcatgggtgtactggatcgggtagagttttcagaggtgatggtgatccacaggatgtatgtgaggctagctgatctgaatgtggggcagctcgagggagccgagaaagtgaagcggttgtatgtgtttgcggacgtggtggagctaccagtcgtggaatggcggtggccgccgcaaataccaggatcggtgacggtgatcatattgtgtcgtcttcttcaatggccaactgatgggaggcagtcggacaccgagctccacctgacattcatgaagttgcatgccatacaacgagaggaaaatcggtgggagataaccgcagcagatggcatgaactggggagtttacatacacgcagaggaagtacaggttggcgtgctgacaatgtcatggtcttcggtacttagagtttcggcacttcgctctgttataacctccggctttcgcgccgttagtgtgtttgaggtaccgggaagtgtaaggtccacccttggagctactttaaggcccgatcacgccttatatagtacaactatgcaagccacacccaacgcatcgcatattagtgcttttaaccttcgcatagtttccccgtcggcatatcgtgtttgtcctctccaaaatgacacagatacctacttaggtattccagcagacgtggcggcagttcttccagtagacgtggtgactgatcctaacatcttgctgggcatgcagacaacggtacacattgcggagctagtcaaggcatgtcatccgtcacccgatgttgtgagcgctgtaggggagcacctgaactggctcaacaaactcttactcccacttaaggaatcgactcagttgcaaggaagcgagtcgtacaaggagtgccttgcactcttgggtcgtgttcacgctgcgatgaagatggtgagaattggcttagtagtgccccagctgcaatacagaatgtacggtagcctcatcaaccaaatggcccaagtagcacaaaactacgaccgagaattcaagcaattcaaattattcatcatccaaaatcaaatccttggcagctatttgctgcagcagaacagggcatttgctgagagggagctgcagatggagagctttcatgctgctgtcatttctcaaagaagggaggagttggacaatacattcgcaaagatggaccgattgagcgggcaaatggaggcagagagtagtgcaatggagcaagccaaaaaggaaatggacgaaggattgaggcagttccagaataggcaagttgcgaacgccctctttgccgttcttagcgctgtagctcagattgggcttgcattccttacggctggtgcaacggctcctggagctgtggcgtcggcggggcaagctgtgagcatagcaggtcaggcggcgcaaggtctgcgaagggtggtggaaattctagagcagctggaggctgtgatggaggttgtggctgctgtgaaggacctcgtggattcattggaacaggtaggtcagattgtggacgcaccggtgatgccggaattgccctcagaggcggactggtccatttttgtgaacgaggtggaggccgtggcagagggcatgccaacggaagtctcggaggttccggtgtggagcgccaggtgcaagagcgtggctgcactgggtcgggagatgagcatcacggcagtacagatgtcggagctgcagtatgacatctgggtgcaaggcatgatgcgggatatggctcgaagccaggcagacaggctggccgcaattcaacccgcggaccttaccaactatttggagatggctacccagatggatatgcggactacgaggatgctgctggggctcctcaacatattgcgcatccagaatgcggcgctcaggtacgagtatcttctaatgcccacggagctcacaacatggccactgggtatggataccgtgggtgacttgctcatcgcgcaggagaatgctgcactgataggattaatgcagctagggccctcatctgatttcacgagcaggcatgtggtgaaagacatacctgtgaacttgctgctcgatggcgaggattgggagtttgagattcctgtgcaagctggcatgtccagcttcccttccagctggtctcgcgtccgtattcggcacctggagatgcactttgtgaaggaggccagcggtattggtggtgagattatccaccagcctaccacccagactgggaccgtttacatccttctgcagggttccactatcttccatgaccgcagaagagaccaggtgttgccttttcaggccgctgctccgctcaactaccattacgcgtaccgcctcgacaccggcgactccactctcacaaacgaaccctctgaacagtttgccaacaagttcatgcagatgacacccttcacccgttggaggcttcgtctgtctgcgtccgcaaaagagaatgcaggattagcctttcccacggctacagcacttgactccactacccagattgtcatcactttccatgttacggccatcagacaaattgactggcggcacgacgaagag

SEQ ID NO: 326 - DNA, 2601 bp, Artificial Sequence
  Synthetic
atggctctcgtggattacggcaagcttttcgaggatctgaaccagataagcatgggtgtactggatcgggtagagttttcagaggtgatggtgatccacaggatgtatgtgaggctagctgatctgaatgtggggcagctcgagggagccgagaaagtgaagcggttgtatgtgtttgcggacgtggtggagctaccagtcgtggaatggcggtggccgccgcaaataccaggatcggtgacggtgatcatattgtgtcgtcttcttcaatggccaactgatgggaggcagtcggacaccgagctccacctgacattcatgaagttgcatgccatacaacgagaggaaaatcggtgggagataaccgcagcagatggcatgaactggggagtttacatacacgcagaggaagtacaggttggcgtgctgacaatgtcatggtcttcggtacttagagtttcggcacttcgctctgttataacctccggctttcgcgccgttagtgtgtttgaggtaccgggaagtgtaaggtccacccttggagctactttaaggcccgatcacgccttatatagtacaactatgcaagccacacccaacgcatcgcatattagtgcttttaaccttcgcatagtttccccgtcggcatatcgtgtttgtcctctccaaaatgacacagatacctacttaggtattccagcagacgtggcggcagttcttccagtagacgtggtgactgatcctaacatcttgctgggcatgcagacaacggtacacattgcggagctagtcaaggcatgtcatccgtcacccgatgttgtgagcgctgtaggggagcacctgaactggctcaacaaactcttactcccacttaaggaatcgactcagttgcaaggaagcgagtcgtacaaggagtgccttgcactcttgggtcgtgttcacgctgcgatgaagatggtgagaattggcttagtagtgccccagctgcaatacagaatgtacggtagcctcatcaaccaaatggcccaagtagcacaaaactacgaccgagaattcaagcaattcaaattattcatcatccaaaatcaaatccttggcagctatttgctgcagcagaacagggcatttgctgagagggagctgcagatggagagctttcatgctgctgtcatttctcaaagaagggaggagttggacaatacattcgcaaagatggaccgattgagcgggcaaatggaggcagagagtagtgcaatggagcaagccaaaaaggaaatggacgaaggattgaggcagttccagaataggcaagttgcgaacgccctctttgccgttcttagcgctgtagctcagattgggcttgcattccttacggctggtgcaacggctcctggagctgtggcgtcggcggggcaagctgtgagcatagcaggtcaggcggcgcaaggtctgcgaagggtggtggaaattctagagcagctggaggctgtgatggaggttgtggctgctgtgaaggacctcgtggattcattggaacaggtaggtcagattgtggacgcaccggtgatgccggaattgccctcagaggcggactggtccatttttgtgaacgaggtggaggccgtggcagagggcatgccaacggaagtctcggaggttccggtgtggagcgtcaagtgcaagcatgtggctgcactgggtcgggagatgagcatcacggcagtacagatgtcggagctgcagtatgacatctgggtgcaaggcatgatgcgggatatggctcgaagccaggcagacaggctggccgcaattcaacccgcggaccttaccaactatttggagatggctacccagatggatatgcggactacgaggatgctgctggggctcctcaacatattgcgcatccagaatgcggcgctcaggtacgagtatcttctaatgcccacggagctcacaacatggccactgggtatggataccgtgggtgacttgctcatcgcgcaggagaatgctgcactgataggattaatgcagctagggccctcatctgatttcacgagcaggcatgtggtgaaagacatacctgtgaacttgctgctcgatggcgaggattgggagtttgagattcctgtgcaagctggcatgtccagcttcccttccagctggtctcgcgtccgtattcggcacctggagatgcactttgtgaaggaggccagcggtattggtggtgagattatccaccagcctaccacccagactgggaccgtttacatccttctgcagggttccactatcttccatgaccgcagaagagaccaggtgttgccttttcaggccgctgctccgctcaactaccattacgcgtaccgcctcgacaccggcgactccactctcacaaacgaaccctctgaacagtttgccaacaagttcatgcagatgacacccttcacccgttggaggcttcgtctgtctgcgtccgcaaaagagaatgcaggattagcctttcccacggctacagcacttgactccactacccagattgtcatcactttccatgttacggccatcagacaaattgactggcggcacgacgaagag

SEQ ID NO: 327 - DNA, 2601 bp, Artificial Sequence
  Synthetic
atggctctcgtggattacggcaagcttttcgaggatctgaaccagataagcatgggtgtactggatcgggtagagttttcagaggtgatggtgatccacaggatgtatgtgaggctagctgatctgaatgtggggcagctcgagggagccgagaaagtgaagcggttgtatgtgtttgcggacgtggtggagctaccagtcgtggaatggcggtggccgccgcaaataccaggatcggtgacggtgatcatattgtgtcgtcttcttcaatggccaactgatgggaggcagtcggacaccgagctccacctgacattcatgaagttgcatgccatacaacgagaggaaaatcggtgggagataaccgcagcagatggcatgaactggggagtttacatacacgcagaggaagtacaggttggcgtgctgacaatgtcatggtcttcggtacttagagtttcggcacttcgctctgttataacctccggctttcgcgccgttagtgtgtttgaggtaccgggaagtgtaaggtccacccttggagctactttaaggcccgatcacgccttatatagtacaactatgcaagccacacccaacgcatcgcatattagtgcttttaaccttcgcatagtttccccgtcggcatatcgtgtttgtcctctccaaaatgacacagatacctacttaggtattccagcagacgtggcggcagttcttccagtagacgtggtgactgatcctaacatcttgctgggcatgcagacaacggtacacattgcggagctagtcaaggcatgtcatccgtcacccgatgttgtgagcgctgtaggggagcacctgaactggctcaacaaactcttactcccacttaaggaatcgactcagttgcaaggaagcgagtcgtacaaggagtgccttgcactcttgggtcgtgttcacgctgcgatgaagatggtgagaattggcttagtagtgccccagctgcaatacagaatgtacggtagcctcatcaaccaaatggcccaagtagcacaaaactacgaccgagaattcaagcaattcaaattattcatcatccaaaatcaaatccttggcagctatttgctgcagcagaacagggcatttgctgagagggagctgcagatggagagctttcatgctgctgtcatttctcaaagaagggaggagttggacaatacattcgcaaagatggaccgattgagcgggcaaatggaggcagagagtagtgcaatggagcaagccaaaaaggaaatggacgaaggattgaggcagttccagaataggcaagttgcgaacgccctctttgccgttcttagcgctgtagctcagattgggcttgcattccttacggctggtgcaacggctcctggagctgtggcgtcggcggggcaagctgtgagcatagcaggtcaggcggcgcaaggtctgcgaagggtggtggaaattctagagcagctggaggctgtgatggaggttgtggctgctgtgaaggacctcgtggattcattggaacaggtaggtcagattgtggacgcaccggtgatgccggaattgccctcagaggcggactggtccatttttgtgaacgaggtggaggccgtggcagagggcatgccaacggaagtctcggaggttccggtgtggacgggccggtgcaagaccgtggctgcactgggtcgggagatgagcatcacggcagtacagatgtcggagctgcagtatgacatctgggtgcaaggcatgatgcgggatatggctcgaagccaggcagacaggctggccgcaattcaacccgcggaccttaccaactatttggagatggctacccagatggatatgcggactacgaggatgctgctggggctcctcaacatattgcgcatccagaatgcggcgctcaggtacgagtatcttctaatgcccacggagctcacaacatggccactgggtatggataccgtgggtgacttgctcatcgcgcaggagaatgctgcactgataggattaatgcagctagggccctcatctgatttcacgagcaggcatgtggtgaaagacatacctgtgaacttgctgctcgatggcgaggattgggagtttgagattcctgtgcaagctggcatgtccagcttcccttccagctggtctcgcgtccgtattcggcacctggagatgcactttgtgaaggaggccagcggtattggtggtgagattatccaccagcctaccacccagactgggaccgtttacatccttctgcagggttccactatcttccatgaccgcagaagagaccaggtgttgccttttcaggccgctgctccgctcaactaccattacgcgtaccgcctcgacaccggcgactccactctcacaaacgaaccctctgaacagtttgccaacaagttcatgcagatgacacccttcacccgttggaggcttcgtctgtctgcgtccgcaaaagagaatgcaggattagcctttcccacggctacagcacttgactccactacccagattgtcatcactttccatgttacggccatcagacaaattgactggcggcacgacgaagag

SEQ ID NO: 328 - DNA, 2601 bp, Artificial Sequence
  Synthetic
atggctctcgtggattacggcaagcttttcgaggatctgaaccagataagcatgggtgtactggatcgggtagagttttcagaggtgatggtgatccacaggatgtatgtgaggctagctgatctgaatgtggggcagctcgagggagccgagaaagtgaagcggttgtatgtgtttgcggacgtggtggagctaccagtcgtggaatggcggtggccgccgcaaataccaggatcggtgacggtgatcatattgtgtcgtcttcttcaatggccaactgatgggaggcagtcggacaccgagctccacctgacattcatgaagttgcatgccatacaacgagaggaaaatcggtgggagataaccgcagcagatggcatgaactggggagtttacatacacgcagaggaagtacaggttggcgtgctgacaatgtcatggtcttcggtacttagagtttcggcacttcgctctgttataacctccggctttcgcgccgttagtgtgtttgaggtaccgggaagtgtaaggtccacccttggagctactttaaggcccgatcacgccttatatagtacaactatgcaagccacacccaacgcatcgcatattagtgcttttaaccttcgcatagtttccccgtcggcatatcgtgtttgtcctctccaaaatgacacagatacctacttaggtattccagcagacgtggcggcagttcttccagtagacgtggtgactgatcctaacatcttgctgggcatgcagacaacggtacacattgcggagctagtcaaggcatgtcatccgtcacccgatgttgtgagcgctgtaggggagcacctgaactggctcaacaaactcttactcccacttaaggaatcgactcagttgcaaggaagcgagtcgtacaaggagtgccttgcactcttgggtcgtgttcacgctgcgatgaagatggtgagaattggcttagtagtgccccagctgcaatacagaatgtacggtagcctcatcaaccaaatggcccaagtagcacaaaactacgaccgagaattcaagcaattcaaattattcatcatccaaaatcaaatccttggcagctatttgctgcagcagaacagggcatttgctgagagggagctgcagatggagagctttcatgctgctgtcatttctcaaagaagggaggagttggacaatacattcgcaaagatggaccgattgagcgggcaaatggaggcagagagtagtgcaatggagcaagccaaaaaggaaatggacgaaggattgaggcagttccagaataggcaagttgcgaacgccctctttgccgttcttagcgctgtagctcagattgggcttgcattccttacggctggtgcaacggctcctggagctgtggcgtcggcggggcaagctgtgagcatagcaggtcaggcggcgcaaggtctgcgaagggtggtggaaattctagagcagctggaggctgtgatggaggttgtggctgctgtgaaggacctcgtggattcattggaacaggtaggtcagattgtggacgcaccggtgatgccggaattgccctcagaggcggactggtccatttttgtgaacgaggtggaggccgtggcagagggcatgccaacggaagtctcggaggttccggtgtggaccggcaggtgcaaccatgtggctgcactgggtcaggagatgagcatcacggcagtacagatgtcggagctgcagtatgacatctgggtgcaaggcatgatgcgggatatggctcgaagccaggcagacaggctggccgcaattcaacccgcggaccttaccaactatttggagatggctacccagatggatatgcggactacgaggatgctgctggggctcctcaacatattgcgcatccagaatgcggcgctcaggtacgagtatcttctaatgcccacggagctcacaacatggccactgggtatggataccgtgggtgacttgctcatcgcgcaggagaatgctgcactgataggattaatgcagctagggccctcatctgatttcacgagcaggcatgtggtgaaagacatacctgtgaacttgctgctcgatggcgaggattgggagtttgagattcctgtgcaagctggcatgtccagcttcccttccagctggtctcgcgtccgtattcggcacctggagatgcactttgtgaaggaggccagcggtattggtggtgagattatccaccagcctaccacccagactgggaccgtttacatccttctgcagggttccactatcttccatgaccgcagaagagaccaggtgttgccttttcaggccgctgctccgctcaactaccattacgcgtaccgcctcgacaccggcgactccactctcacaaacgaaccctctgaacagtttgccaacaagttcatgcagatgacacccttcacccgttggaggcttcgtctgtctgcgtccgcaaaagagaatgcaggattagcctttcccacggctacagcacttgactccactacccagattgtcatcactttccatgttacggccatcagacaaattgactggcggcacgacgaagag

SEQ ID NO: 329 - DNA, 2601 bp, Artificial Sequence
  Synthetic
atggctctcgtggattacggcaagcttttcgaggatctgaaccagataagcatgggtgtactggatcgggtagagttttcagaggtgatggtgatccacaggatgtatgtgaggctagctgatctgaatgtggggcagctcgagggagccgagaaagtgaagcggttgtatgtgtttgcggacgtggtggagctaccagtcgtggaatggcggtggccgccgcaaataccaggatcggtgacggtgatcatattgtgtcgtcttcttcaatggccaactgatgggaggcagtcggacaccgagctccacctgacattcatgaagttgcatgccatacaacgagaggaaaatcggtgggagataaccgcagcagatggcatgaactggggagtttacatacacgcagaggaagtacaggttggcgtgctgacaatgtcatggtcttcggtacttagagtttcggcacttcgctctgttataacctccggctttcgcgccgttagtgtgtttgaggtaccgggaagtgtaaggtccacccttggagctactttaaggcccgatcacgccttatatagtacaactatgcaagccacacccaacgcatcgcatattagtgcttttaaccttcgcatagtttccccgtcggcatatcgtgtttgtcctctccaaaatgacacagatacctacttaggtattccagcagacgtggcggcagttcttccagtagacgtggtgactgatcctaacatcttgctgggcatgcagacaacggtacacattgcggagctagtcaaggcatgtcatccgtcacccgatgttgtgagcgctgtaggggagcacctgaactggctcaacaaactcttactcccacttaaggaatcgactcagttgcaaggaagcgagtcgtacaaggagtgccttgcactcttgggtcgtgttcacgctgcgatgaagatggtgagaattggcttagtagtgccccagctgcaatacagaatgtacggtagcctcatcaaccaaatggcccaagtagcacaaaactacgaccgagaattcaagcaattcaaattattcatcatccaaaatcaaatccttggcagctatttgctgcagcagaacagggcatttgctgagagggagctgcagatggagagctttcatgctgctgtcatttctcaaagaagggaggagttggacaatacattcgcaaagatggaccgattgagcgggcaaatggaggcagagagtagtgcaatggagcaagccaaaaaggaaatggacgaaggattgaggcagttccagaataggcaagttgcgaacgccctctttgccgttcttagcgctgtagctcagattgggcttgcattccttacggctggtgcaacggctcctggagctgtggcgtcggcggggcaagctgtgagcatagcaggtcaggcggcgcaaggtctgcgaagggtggtggaaattctagagcagctggaggctgtgatggaggttgtggctgctgtgaaggacctcgtggattcattggaacaggtaggtcagattgtggacgcaccggtgatgccggaattgccctcagaggcggactggtccatttttgtgaacgaggtggaggccgtggcagagggcatgccaacggaagtctcggaggttccggtgtggacggtcaagtgcaagaatgtggctgcactgggtcgggagatgagcatcacggcagtacagatgtcggagctgcagtatgacatctgggtgcaaggcatgatgcgggatatggctcgaagccaggcagacaggctggccgcaattcaacccgcggaccttaccaactatttggagatggctacccagatggatatgcggactacgaggatgctgctggggctcctcaacatattgcgcatccagaatgcggcgctcaggtacgagtatcttctaatgcccacggagctcacaacatggccactgggtatggataccgtgggtgacttgctcatcgcgcaggagaatgctgcactgataggattaatgcagctagggccctcatctgatttcacgagcaggcatgtggtgaaagacatacctgtgaacttgctgctcgatggcgaggattgggagtttgagattcctgtgcaagctggcatgtccagcttcccttccagctggtctcgcgtccgtattcggcacctggagatgcactttgtgaaggaggccagcggtattggtggtgagattatccaccagcctaccacccagactgggaccgtttacatccttctgcagggttccactatcttccatgaccgcagaagagaccaggtgttgccttttcaggccgctgctccgctcaactaccattacgcgtaccgcctcgacaccggcgactccactctcacaaacgaaccctctgaacagtttgccaacaagttcatgcagatgacacccttcacccgttggaggcttcgtctgtctgcgtccgcaaaagagaatgcaggattagcctttcccacggctacagcacttgactccactacccagattgtcatcactttccatgttacggccatcagacaaattgactggcggcacgacgaagag

SEQ ID NO: 330 - DNA, 2601 bp, Artificial Sequence
  Synthetic
atggctctcgtggattacggcaagcttttcgaggatctgaaccagataagcatgggtgtactggatcgggtagagttttcagaggtgatggtgatccacaggatgtatgtgaggctagctgatctgaatgtggggcagctcgagggagccgagaaagtgaagcggttgtatgtgtttgcggacgtggtggagctaccagtcgtggaatggcggtggccgccgcaaataccaggatcggtgacggtgatcatattgtgtcgtcttcttcaatggccaactgatgggaggcagtcggacaccgagctccacctgacattcatgaagttgcatgccatacaacgagaggaaaatcggtgggagataaccgcagcagatggcatgaactggggagtttacatacacgcagaggaagtacaggttggcgtgctgacaatgtcatggtcttcggtacttagagtttcggcacttcgctctgttataacctccggctttcgcgccgttagtgtgtttgaggtaccgggaagtgtaaggtccacccttggagctactttaaggcccgatcacgccttatatagtacaactatgcaagccacacccaacgcatcgcatattagtgcttttaaccttcgcatagtttccccgtcggcatatcgtgtttgtcctctccaaaatgacacagatacctacttaggtattccagcagacgtggcggcagttcttccagtagacgtggtgactgatcctaacatcttgctgggcatgcagacaacggtacacattgcggagctagtcaaggcatgtcatccgtcacccgatgttgtgagcgctgtaggggagcacctgaactggctcaacaaactcttactcccacttaaggaatcgactcagttgcaaggaagcgagtcgtacaaggagtgccttgcactcttgggtcgtgttcacgctgcgatgaagatggtgagaattggcttagtagtgccccagctgcaatacagaatgtacggtagcctcatcaaccaaatggcccaagtagcacaaaactacgaccgagaattcaagcaattcaaattattcatcatccaaaatcaaatccttggcagctatttgctgcagcagaacagggcatttgctgagagggagctgcagatggagagctttcatgctgctgtcatttctcaaagaagggaggagttggacaatacattcgcaaagatggaccgattgagcgggcaaatggaggcagagagtagtgcaatggagcaagccaaaaaggaaatggacgaaggattgaggcagttccagaataggcaagttgcgaacgccctctttgccgttcttagcgctgtagctcagattgggcttgcattccttacggctggtgcaacggctcctggagctgtggcgtcggcggggcaagctgtgagcatagcaggtcaggcggcgcaaggtctgcgaagggtggtggaaattctagagcagctggaggctgtgatggaggttgtggctgctgtgaaggacctcgtggattcattggaacaggtaggtcagattgtggacgcaccggtgatgccggaattgccctcagaggcggactggtccatttttgtgaacgaggtggaggccgtggcagagggcatgccaacggaagtctcggaggttccggtgtggaccgtcaagtgcaagagcgtggctgcactgggtcgggagatgagcatcacggcagtacagatgtcggagctgcagtatgacatctgggtgcaaggcatgatgcgggatatggctcgaagccaggcagacaggctggccgcaattcaacccgcggaccttaccaactatttggagatggctacccagatggatatgcggactacgaggatgctgctggggctcctcaacatattgcgcatccagaatgcggcgctcaggtacgagtatcttctaatgcccacggagctcacaacatggccactgggtatggataccgtgggtgacttgctcatcgcgcaggagaatgctgcactgataggattaatgcagctagggccctcatctgatttcacgagcaggcatgtggtgaaagacatacctgtgaacttgctgctcgatggcgaggattgggagtttgagattcctgtgcaagctggcatgtccagcttcccttccagctggtctcgcgtccgtattcggcacctggagatgcactttgtgaaggaggccagcggtattggtggtgagattatccaccagcctaccacccagactgggaccgtttacatccttctgcagggttccactatcttccatgaccgcagaagagaccaggtgttgccttttcaggccgctgctccgctcaactaccattacgcgtaccgcctcgacaccggcgactccactctcacaaacgaaccctctgaacagtttgccaacaagttcatgcagatgacacccttcacccgttggaggcttcgtctgtctgcgtccgcaaaagagaatgcaggattagcctttcccacggctacagcacttgactccactacccagattgtcatcactttccatgttacggccatcagacaaattgactggcggcacgacgaagag

SEQ ID NO: 331 - DNA, 2601 bp, Artificial Sequence
  Synthetic
atggctctcgtggattacggcaagcttttcgaggatctgaaccagataagcatgggtgtactggatcgggtagagttttcagaggtgatggtgatccacaggatgtatgtgaggctagctgatctgaatgtggggcagctcgagggagccgagaaagtgaagcggttgtatgtgtttgcggacgtggtggagctaccagtcgtggaatggcggtggccgccgcaaataccaggatcggtgacggtgatcatattgtgtcgtcttcttcaatggccaactgatgggaggcagtcggacaccgagctccacctgacattcatgaagttgcatgccatacaacgagaggaaaatcggtgggagataaccgcagcagatggcatgaactggggagtttacatacacgcagaggaagtacaggttggcgtgctgacaatgtcatggtcttcggtacttagagtttcggcacttcgctctgttataacctccggctttcgcgccgttagtgtgtttgaggtaccgggaagtgtaaggtccacccttggagctactttaaggcccgatcacgccttatatagtacaactatgcaagccacacccaacgcatcgcatattagtgcttttaaccttcgcatagtttccccgtcggcatatcgtgtttgtcctctccaaaatgacacagatacctacttaggtattccagcagacgtggcggcagttcttccagtagacgtggtgactgatcctaacatcttgctgggcatgcagacaacggtacacattgcggagctagtcaaggcatgtcatccgtcacccgatgttgtgagcgctgtaggggagcacctgaactggctcaacaaactcttactcccacttaaggaatcgactcagttgcaaggaagcgagtcgtacaaggagtgccttgcactcttgggtcgtgttcacgctgcgatgaagatggtgagaattggcttagtagtgccccagctgcaatacagaatgtacggtagcctcatcaaccaaatggcccaagtagcacaaaactacgaccgagaattcaagcaattcaaattattcatcatccaaaatcaaatccttggcagctatttgctgcagcagaacagggcatttgctgagagggagctgcagatggagagctttcatgctgctgtcatttctcaaagaagggaggagttggacaatacattcgcaaagatggaccgattgagcgggcaaatggaggcagagagtagtgcaatggagcaagccaaaaaggaaatggacgaaggattgaggcagttccagaataggcaagttgcgaacgccctctttgccgttcttagcgctgtagctcagattgggcttgcattccttacggctggtgcaacggctcctggagctgtggcgtcggcggggcaagctgtgagcatagcaggtcaggcggcgcaaggtctgcgaagggtggtggaaattctagagcagctggaggctgtgatggaggttgtggctgctgtgaaggacctcgtggattcattggaacaggtaggtcagattgtggacgcaccggtgatgccggaattgccctcagaggcggactggtccatttttgtgaacgaggtggaggccgtggcagagggcatgccaacggaagtctcggaggttccggtgtggaccgtcaggtgcaagaatgtggctgcactgggtcgggagatgagcatcacggcagtacagatgtcggagctgcagtatgacatctgggtgcaaggcatgatgcgggatatggctcgaagccaggcagacaggctggccgcaattcaacccgcggaccttaccaactatttggagatggctacccagatggatatgcggactacgaggatgctgctggggctcctcaacatattgcgcatccagaatgcggcgctcaggtacgagtatcttctaatgcccacggagctcacaacatggccactgggtatggataccgtgggtgacttgctcatcgcgcaggagaatgctgcactgataggattaatgcagctagggccctcatctgatttcacgagcaggcatgtggtgaaagacatacctgtgaacttgctgctcgatggcgaggattgggagtttgagattcctgtgcaagctggcatgtccagcttcccttccagctggtctcgcgtccgtattcggcacctggagatgcactttgtgaaggaggccagcggtattggtggtgagattatccaccagcctaccacccagactgggaccgtttacatccttctgcagggttccactatcttccatgaccgcagaagagaccaggtgttgccttttcaggccgctgctccgctcaactaccattacgcgtaccgcctcgacaccggcgactccactctcacaaacgaaccctctgaacagtttgccaacaagttcatgcagatgacacccttcacccgttggaggcttcgtctgtctgcgtccgcaaaagagaatgcaggattagcctttcccacggctacagcacttgactccactacccagattgtcatcactttccatgttacggccatcagacaaattgactggcggcacgacgaagag

SEQ ID NO: 332 - DNA, 2601 bp, Artificial Sequence
  Synthetic
atggctctcgtggattacggcaagcttttcgaggatctgaaccagataagcatgggtgtactggatcgggtagagttttcagaggtgatggtgatccacaggatgtatgtgaggctagctgatctgaatgtggggcagctcgagggagccgagaaagtgaagcggttgtatgtgtttgcggacgtggtggagctaccagtcgtggaatggcggtggccgccgcaaataccaggatcggtgacggtgatcatattgtgtcgtcttcttcaatggccaactgatgggaggcagtcggacaccgagctccacctgacattcatgaagttgcatgccatacaacgagaggaaaatcggtgggagataaccgcagcagatggcatgaactggggagtttacatacacgcagaggaagtacaggttggcgtgctgacaatgtcatggtcttcggtacttagagtttcggcacttcgctctgttataacctccggctttcgcgccgttagtgtgtttgaggtaccgggaagtgtaaggtccacccttggagctactttaaggcccgatcacgccttatatagtacaactatgcaagccacacccaacgcatcgcatattagtgcttttaaccttcgcatagtttccccgtcggcatatcgtgtttgtcctctccaaaatgacacagatacctacttaggtattccagcagacgtggcggcagttcttccagtagacgtggtgactgatcctaacatcttgctgggcatgcagacaacggtacacattgcggagctagtcaaggcatgtcatccgtcacccgatgttgtgagcgctgtaggggagcacctgaactggctcaacaaactcttactcccacttaaggaatcgactcagttgcaaggaagcgagtcgtacaaggagtgccttgcactcttgggtcgtgttcacgctgcgatgaagatggtgagaattggcttagtagtgccccagctgcaatacagaatgtacggtagcctcatcaaccaaatggcccaagtagcacaaaactacgaccgagaattcaagcaattcaaattattcatcatccaaaatcaaatccttggcagctatttgctgcagcagaacagggcatttgctgagagggagctgcagatggagagctttcatgctgctgtcatttctcaaagaagggaggagttggacaatacattcgcaaagatggaccgattgagcgggcaaatggaggcagagagtagtgcaatggagcaagccaaaaaggaaatggacgaaggattgaggcagttccagaataggcaagttgcgaacgccctctttgccgttcttagcgctgtagctcagattgggcttgcattccttacggctggtgcaacggctcctggagctgtggcgtcggcggggcaagctgtgagcatagcaggtcaggcggcgcaaggtctgcgaagggtggtggaaattctagagcagctggaggctgtgatggaggttgtggctgctgtgaaggacctcgtggattcattggaacaggtaggtcagattgtggacgcaccggtgatgccggaattgccctcagaggcggactggtccatttttgtgaacgaggtggaggccgtggcagagggcatgccaacggaagtctcggaggttccggtgtggagggcccggtgcaagcatgtggctgcactgggtcgggagatgagcatcacggcagtacagatgtcggagctgcagtatgacatctgggtgcaaggcatgatgcgggatatggctcgaagccaggcagacaggctggccgcaattcaacccgcggaccttaccaactatttggagatggctacccagatggatatgcggactacgaggatgctgctggggctcctcaacatattgcgcatccagaatgcggcgctcaggtacgagtatcttctaatgcccacggagctcacaacatggccactgggtatggataccgtgggtgacttgctcatcgcgcaggagaatgctgcactgataggattaatgcagctagggccctcatctgatttcacgagcaggcatgtggtgaaagacatacctgtgaacttgctgctcgatggcgaggattgggagtttgagattcctgtgcaagctggcatgtccagcttcccttccagctggtctcgcgtccgtattcggcacctggagatgcactttgtgaaggaggccagcggtattggtggtgagattatccaccagcctaccacccagactgggaccgtttacatccttctgcagggttccactatcttccatgaccgcagaagagaccaggtgttgccttttcaggccgctgctccgctcaactaccattacgcgtaccgcctcgacaccggcgactccactctcacaaacgaaccctctgaacagtttgccaacaagttcatgcagatgacacccttcacccgttggaggcttcgtctgtctgcgtccgcaaaagagaatgcaggattagcctttcccacggctacagcacttgactccactacccagattgtcatcactttccatgttacggccatcagacaaattgactggcggcacgacgaagag

SEQ ID NO: 333 - DNA, 2601 bp, Artificial Sequence
  Synthetic
atggctctcgtggattacggcaagcttttcgaggatctgaaccagataagcatgggtgtactggatcgggtagagttttcagaggtgatggtgatccacaggatgtatgtgaggctagctgatctgaatgtggggcagctcgagggagccgagaaagtgaagcggttgtatgtgtttgcggacgtggtggagctaccagtcgtggaatggcggtggccgccgcaaataccaggatcggtgacggtgatcatattgtgtcgtcttcttcaatggccaactgatgggaggcagtcggacaccgagctccacctgacattcatgaagttgcatgccatacaacgagaggaaaatcggtgggagataaccgcagcagatggcatgaactggggagtttacatacacgcagaggaagtacaggttggcgtgctgacaatgtcatggtcttcggtacttagagtttcggcacttcgctctgttataacctccggctttcgcgccgttagtgtgtttgaggtaccgggaagtgtaaggtccacccttggagctactttaaggcccgatcacgccttatatagtacaactatgcaagccacacccaacgcatcgcatattagtgcttttaaccttcgcatagtttccccgtcggcatatcgtgtttgtcctctccaaaatgacacagatacctacttaggtattccagcagacgtggcggcagttcttccagtagacgtggtgactgatcctaacatcttgctgggcatgcagacaacggtacacattgcggagctagtcaaggcatgtcatccgtcacccgatgttgtgagcgctgtaggggagcacctgaactggctcaacaaactcttactcccacttaaggaatcgactcagttgcaaggaagcgagtcgtacaaggagtgccttgcactcttgggtcgtgttcacgctgcgatgaagatggtgagaattggcttagtagtgccccagctgcaatacagaatgtacggtagcctcatcaaccaaatggcccaagtagcacaaaactacgaccgagaattcaagcaattcaaattattcatcatccaaaatcaaatccttggcagctatttgctgcagcagaacagggcatttgctgagagggagctgcagatggagagctttcatgctgctgtcatttctcaaagaagggaggagttggacaatacattcgcaaagatggaccgattgagcgggcaaatggaggcagagagtagtgcaatggagcaagccaaaaaggaaatggacgaaggattgaggcagttccagaataggcaagttgcgaacgccctctttgccgttcttagcgctgtagctcagattgggcttgcattccttacggctggtgcaacggctcctggagctgtggcgtcggcggggcaagctgtgagcatagcaggtcaggcggcgcaaggtctgcgaagggtggtggaaattctagagcagctggaggctgtgatggaggttgtggctgctgtgaaggacctcgtggattcattggaacaggtaggtcagattgtggacgcaccggtgatgccggaattgccctcagaggcggactggtccatttttgtgaacgaggtggaggccgtggcagagggcatgccaacggaagtctcggaggttccggtgtggatcggccggtgcaagtccgtggctgcactgggtcgggagatgagcatcacggcagtacagatgtcggagctgcagtatgacatctgggtgcaaggcatgatgcgggatatggctcgaagccaggcagacaggctggccgcaattcaacccgcggaccttaccaactatttggagatggctacccagatggatatgcggactacgaggatgctgctggggctcctcaacatattgcgcatccagaatgcggcgctcaggtacgagtatcttctaatgcccacggagctcacaacatggccactgggtatggataccgtgggtgacttgctcatcgcgcaggagaatgctgcactgataggattaatgcagctagggccctcatctgatttcacgagcaggcatgtggtgaaagacatacctgtgaacttgctgctcgatggcgaggattgggagtttgagattcctgtgcaagctggcatgtccagcttcccttccagctggtctcgcgtccgtattcggcacctggagatgcactttgtgaaggaggccagcggtattggtggtgagattatccaccagcctaccacccagactgggaccgtttacatccttctgcagggttccactatcttccatgaccgcagaagagaccaggtgttgccttttcaggccgctgctccgctcaactaccattacgcgtaccgcctcgacaccggcgactccactctcacaaacgaaccctctgaacagtttgccaacaagttcatgcagatgacacccttcacccgttggaggcttcgtctgtctgcgtccgcaaaagagaatgcaggattagcctttcccacggctacagcacttgactccactacccagattgtcatcactttccatgttacggccatcagacaaattgactggcggcacgacgaagag

SEQ ID NO: 334 - protein, 867 aa, Artificial Sequence
  Synthetic
MALVDYGKLFEDLNQISMGVLDRVEFSEVMVIHRMYVRLADLNVGQLEGAEKVKRLYVFADVVELPVVEWRWPPQIPGSVTVIILCRLLQWPTDGRQSDTELHLTFMKLHAIQREENRWEITAADGMNWGVYIHAEEVQVGVLTMSWSSVLRVSALRSVITSGFRAVSVFEVPGSVRSTLGATLRPDHALYSTTMQATPNASHISAFNLRIVSPSAYRVCPLQNDTDTYLGIPADVAAVLPVDVVTDPNILLGMQTTVHIAELVKACHPSPDVVSAVGEHLNWLNKLLLPLKESTQLQGSESYKECLALLGRVHAAMKMVRIGLVVPQLQYRMYGSLINQMAQVAQNYDREFKQFKLFIIQNQILGSYLLQQNRAFAERELQMESFHAAVISQRREELDNTFAKMDRLSGQMEAESSAMEQAKKEMDEGLRQFQNRQVANALFAVLSAVAQIGLAFLTAGATAPGAVASAGQAVSIAGQAAQGLRRVVEILEQLEAVMEVVAAVKDLVDSLEQVGQIVDAPVMPELPSEADWSIFVNEVEAVAEGMPTEVSEVPVWHARCKSVAALGREMSITAVQMSELQYDIWVQGMMRDMARSQADRLAAIQPADLTNYLEMATQMDMRTTRMLLGLLNILRIQNAALRYEYLLMPTELTTWPLGMDTVGDLLIAQENAALIGLMQLGPSSDFTSRHVVKDIPVNLLLDGEDWEFEIPVQAGMSSFPSSWSRVRIRHLEMHFVKEASGIGGEIIHQPTTQTGTVYILLQGSTIFHDRRRDQVLPFQAAAPLNYHYAYRLDTGDSTLTNEPSEQFANKFMQMTPFTRWRLRLSASAKENAGLAFPTATALDSTTQIVITFHVTAIRQIDWRHDEE

SEQ ID NO: 335 - protein, 867 aa, Artificial Sequence
  Synthetic
MALVDYGKLFEDLNQISMGVLDRVEFSEVMVIHRMYVRLADLNVGQLEGAEKVKRLYVFADVVELPVVEWRWPPQIPGSVTVIILCRLLQWPTDGRQSDTELHLTFMKLHAIQREENRWEITAADGMNWGVYIHAEEVQVGVLTMSWSSVLRVSALRSVITSGFRAVSVFEVPGSVRSTLGATLRPDHALYSTTMQATPNASHISAFNLRIVSPSAYRVCPLQNDTDTYLGIPADVAAVLPVDVVTDPNILLGMQTTVHIAELVKACHPSPDVVSAVGEHLNWLNKLLLPLKESTQLQGSESYKECLALLGRVHAAMKMVRIGLVVPQLQYRMYGSLINQMAQVAQNYDREFKQFKLFIIQNQILGSYLLQQNRAFAERELQMESFHAAVISQRREELDNTFAKMDRLSGQMEAESSAMEQAKKEMDEGLRQFQNRQVANALFAVLSAVAQIGLAFLTAGATAPGAVASAGQAVSIAGQAAQGLRRVVEILEQLEAVMEVVAAVKDLVDSLEQVGQIVDAPVMPELPSEADWSIFVNEVEAVAEGMPTEVSEVPVWHGKCKNVAALGREMSITAVQMSELQYDIWVQGMMRDMARSQADRLAAIQPADLTNYLEMATQMDMRTTRMLLGLLNILRIQNAALRYEYLLMPTELTTWPLGMDTVGDLLIAQENAALIGLMQLGPSSDFTSRHVVKDIPVNLLLDGEDWEFEIPVQAGMSSFPSSWSRVRIRHLEMHFVKEASGIGGEIIHQPTTQTGTVYILLQGSTIFHDRRRDQVLPFQAAAPLNYHYAYRLDTGDSTLTNEPSEQFANKFMQMTPFTRWRLRLSASAKENAGLAFPTATALDSTTQIVITFHVTAIRQIDWRHDEE

SEQ ID NO: 336 - protein, 867 aa, Artificial Sequence
  Synthetic
MALVDYGKLFEDLNQISMGVLDRVEFSEVMVIHRMYVRLADLNVGQLEGAEKVKRLYVFADVVELPVVEWRWPPQIPGSVTVIILCRLLQWPTDGRQSDTELHLTFMKLHAIQREENRWEITAADGMNWGVYIHAEEVQVGVLTMSWSSVLRVSALRSVITSGFRAVSVFEVPGSVRSTLGATLRPDHALYSTTMQATPNASHISAFNLRIVSPSAYRVCPLQNDTDTYLGIPADVAAVLPVDVVTDPNILLGMQTTVHIAELVKACHPSPDVVSAVGEHLNWLNKLLLPLKESTQLQGSESYKECLALLGRVHAAMKMVRIGLVVPQLQYRMYGSLINQMAQVAQNYDREFKQFKLFIIQNQILGSYLLQQNRAFAERELQMESFHAAVISQRREELDNTFAKMDRLSGQMEAESSAMEQAKKEMDEGLRQFQNRQVANALFAVLSAVAQIGLAFLTAGATAPGAVASAGQAVSIAGQAAQGLRRVVEILEQLEAVMEVVAAVKDLVDSLEQVGQIVDAPVMPELPSEADWSIFVNEVEAVAEGMPTEVSEVPVWIAKCKCVAALGREMSITAVQMSELQYDIWVQGMMRDMARSQADRLAAIQPADLTNYLEMATQMDMRTTRMLLGLLNILRIQNAALRYEYLLMPTELTTWPLGMDTVGDLLIAQENAALIGLMQLGPSSDFTSRHVVKDIPVNLLLDGEDWEFEIPVQAGMSSFPSSWSRVRIRHLEMHFVKEASGIGGEIIHQPTTQTGTVYILLQGSTIFHDRRRDQVLPFQAAAPLNYHYAYRLDTGDSTLTNEPSEQFANKFMQMTPFTRWRLRLSASAKENAGLAFPTATALDSTTQIVITFHVTAIRQIDWRHDEE

SEQ ID NO: 337 - protein, 867 aa, Artificial Sequence
  Synthetic
MALVDYGKLFEDLNQISMGVLDRVEFSEVMVIHRMYVRLADLNVGQLEGAEKVKRLYVFADVVELPVVEWRWPPQIPGSVTVIILCRLLQWPTDGRQSDTELHLTFMKLHAIQREENRWEITAADGMNWGVYIHAEEVQVGVLTMSWSSVLRVSALRSVITSGFRAVSVFEVPGSVRSTLGATLRPDHALYSTTMQATPNASHISAFNLRIVSPSAYRVCPLQNDTDTYLGIPADVAAVLPVDVVTDPNILLGMQTTVHIAELVKACHPSPDVVSAVGEHLNWLNKLLLPLKESTQLQGSESYKECLALLGRVHAAMKMVRIGLVVPQLQYRMYGSLINQMAQVAQNYDREFKQFKLFIIQNQILGSYLLQQNRAFAERELQMESFHAAVISQRREELDNTFAKMDRLSGQMEAESSAMEQAKKEMDEGLRQFQNRQVANALFAVLSAVAQIGLAFLTAGATAPGAVASAGQAVSIAGQAAQGLRRVVEILEQLEAVMEVVAAVKDLVDSLEQVGQIVDAPVMPELPSEADWSIFVNEVEAVAEGMPTEVSEVPVWIAKCKSVAALGREMSITAVQMSELQYDIWVQGMMRDMARSQADRLAAIQPADLTNYLEMATQMDMRTTRMLLGLLNILRIQNAALRYEYLLMPTELTTWPLGMDTVGDLLIAQENAALIGLMQLGPSSDFTSRHVVKDIPVNLLLDGEDWEFEIPVQAGMSSFPSSWSRVRIRHLEMHFVKEASGIGGEIIHQPTTQTGTVYILLQGSTIFHDRRRDQVLPFQAAAPLNYHYAYRLDTGDSTLTNEPSEQFANKFMQMTPFTRWRLRLSASAKENAGLAFPTATALDSTTQIVITFHVTAIRQIDWRHDEE

SEQ ID NO: 338 - protein, 867 aa, Artificial Sequence
  Synthetic
MALVDYGKLFEDLNQISMGVLDRVEFSEVMVIHRMYVRLADLNVGQLEGAEKVKRLYVFADVVELPVVEWRWPPQIPGSVTVIILCRLLQWPTDGRQSDTELHLTFMKLHAIQREENRWEITAADGMNWGVYIHAEEVQVGVLTMSWSSVLRVSALRSVITSGFRAVSVFEVPGSVRSTLGATLRPDHALYSTTMQATPNASHISAFNLRIVSPSAYRVCPLQNDTDTYLGIPADVAAVLPVDVVTDPNILLGMQTTVHIAELVKACHPSPDVVSAVGEHLNWLNKLLLPLKESTQLQGSESYKECLALLGRVHAAMKMVRIGLVVPQLQYRMYGSLINQMAQVAQNYDREFKQFKLFIIQNQILGSYLLQQNRAFAERELQMESFHAAVISQRREELDNTFAKMDRLSGQMEAESSAMEQAKKEMDEGLRQFQNRQVANALFAVLSAVAQIGLAFLTAGATAPGAVASAGQAVSIAGQAAQGLRRVVEILEQLEAVMEVVAAVKDLVDSLEQVGQIVDAPVMPELPSEADWSIFVNEVEAVAEGMPTEVSEVPVWIGKCKNVAALGREMSITAVQMSELQYDIWVQGMMRDMARSQADRLAAIQPADLTNYLEMATQMDMRTTRMLLGLLNILRIQNAALRYEYLLMPTELTTWPLGMDTVGDLLIAQENAALIGLMQLGPSSDFTSRHVVKDIPVNLLLDGEDWEFEIPVQAGMSSFPSSWSRVRIRHLEMHFVKEASGIGGEIIHQPTTQTGTVYILLQGSTIFHDRRRDQVLPFQAAAPLNYHYAYRLDTGDSTLTNEPSEQFANKFMQMTPFTRWRLRLSASAKENAGLAFPTATALDSTTQIVITFHVTAIRQIDWRHDEE

SEQ ID NO: 339 - protein, 867 aa, Artificial Sequence
  Synthetic
MALVDYGKLFEDLNQISMGVLDRVEFSEVMVIHRMYVRLADLNVGQLEGAEKVKRLYVFADVVELPVVEWRWPPQIPGSVTVIILCRLLQWPTDGRQSDTELHLTFMKLHAIQREENRWEITAADGMNWGVYIHAEEVQVGVLTMSWSSVLRVSALRSVITSGFRAVSVFEVPGSVRSTLGATLRPDHALYSTTMQATPNASHISAFNLRIVSPSAYRVCPLQNDTDTYLGIPADVAAVLPVDVVTDPNILLGMQTTVHIAELVKACHPSPDVVSAVGEHLNWLNKLLLPLKESTQLQGSESYKECLALLGRVHAAMKMVRIGLVVPQLQYRMYGSLINQMAQVAQNYDREFKQFKLFIIQNQILGSYLLQQNRAFAERELQMESFHAAVISQRREELDNTFAKMDRLSGQMEAESSAMEQAKKEMDEGLRQFQNRQVANALFAVLSAVAQIGLAFLTAGATAPGAVASAGQAVSIAGQAAQGLRRVVEILEQLEAVMEVVAAVKDLVDSLEQVGQIVDAPVMPELPSEADWSIFVNEVEAVAEGMPTEVSEVPVWIGKCKSVAALGREMSITAVQMSELQYDIWVQGMMRDMARSQADRLAAIQPADLTNYLEMATQMDMRTTRMLLGLLNILRIQNAALRYEYLLMPTELTTWPLGMDTVGDLLIAQENAALIGLMQLGPSSDFTSRHVVKDIPVNLLLDGEDWEFEIPVQAGMSSFPSSWSRVRIRHLEMHFVKEASGIGGEIIHQPTTQTGTVYILLQGSTIFHDRRRDQVLPFQAAAPLNYHYAYRLDTGDSTLTNEPSEQFANKFMQMTPFTRWRLRLSASAKENAGLAFPTATALDSTTQIVITFHVTAIRQIDWRHDEE

SEQ ID NO: 340 - protein, 867 aa, Artificial Sequence
  Synthetic
MALVDYGKLFEDLNQISMGVLDRVEFSEVMVIHRMYVRLADLNVGQLEGAEKVKRLYVFADVVELPVVEWRWPPQIPGSVTVIILCRLLQWPTDGRQSDTELHLTFMKLHAIQREENRWEITAADGMNWGVYIHAEEVQVGVLTMSWSSVLRVSALRSVITSGFRAVSVFEVPGSVRSTLGATLRPDHALYSTTMQATPNASHISAFNLRIVSPSAYRVCPLQNDTDTYLGIPADVAAVLPVDVVTDPNILLGMQTTVHIAELVKACHPSPDVVSAVGEHLNWLNKLLLPLKESTQLQGSESYKECLALLGRVHAAMKMVRIGLVVPQLQYRMYGSLINQMAQVAQNYDREFKQFKLFIIQNQILGSYLLQQNRAFAERELQMESFHAAVISQRREELDNTFAKMDRLSGQMEAESSAMEQAKKEMDEGLRQFQNRQVANALFAVLSAVAQIGLAFLTAGATAPGAVASAGQAVSIAGQAAQGLRRVVEILEQLEAVMEVVAAVKDLVDSLEQVGQIVDAPVMPELPSEADWSIFVNEVEAVAEGMPTEVSEVPVWIGKCNNVAALGREMSITAVQMSELQYDIWVQGMMRDMARSQADRLAAIQPADLTNYLEMATQMDMRTTRMLLGLLNILRIQNAALRYEYLLMPTELTTWPLGMDTVGDLLIAQENAALIGLMQLGPSSDFTSRHVVKDIPVNLLLDGEDWEFEIPVQAGMSSFPSSWSRVRIRHLEMHFVKEASGIGGEIIHQPTTQTGTVYILLQGSTIFHDRRRDQVLPFQAAAPLNYHYAYRLDTGDSTLTNEPSEQFANKFMQMTPFTRWRLRLSASAKENAGLAFPTATALDSTTQIVITFHVTAIRQIDWRHDEE

SEQ ID NO: 341 - protein, 867 aa, Artificial Sequence
  Synthetic
MALVDYGKLFEDLNQISMGVLDRVEFSEVMVIHRMYVRLADLNVGQLEGAEKVKRLYVFADVVELPVVEWRWPPQIPGSVTVIILCRLLQWPTDGRQSDTELHLTFMKLHAIQREENRWEITAADGMNWGVYIHAEEVQVGVLTMSWSSVLRVSALRSVITSGFRAVSVFEVPGSVRSTLGATLRPDHALYSTTMQATPNASHISAFNLRIVSPSAYRVCPLQNDTDTYLGIPADVAAVLPVDVVTDPNILLGMQTTVHIAELVKACHPSPDVVSAVGEHLNWLNKLLLPLKESTQLQGSESYKECLALLGRVHAAMKMVRIGLVVPQLQYRMYGSLINQMAQVAQNYDREFKQFKLFIIQNQILGSYLLQQNRAFAERELQMESFHAAVISQRREELDNTFAKMDRLSGQMEAESSAMEQAKKEMDEGLRQFQNRQVANALFAVLSAVAQIGLAFLTAGATAPGAVASAGQAVSIAGQAAQGLRRVVEILEQLEAVMEVVAAVKDLVDSLEQVGQIVDAPVMPELPSEADWSIFVNEVEAVAEGMPTEVSEVPVWIVKCKSVAALGREMSITAVQMSELQYDIWVQGMMRDMARSQADRLAAIQPADLTNYLEMATQMDMRTTRMLLGLLNILRIQNAALRYEYLLMPTELTTWPLGMDTVGDLLIAQENAALIGLMQLGPSSDFTSRHVVKDIPVNLLLDGEDWEFEIPVQAGMSSFPSSWSRVRIRHLEMHFVKEASGIGGEIIHQPTTQTGTVYILLQGSTIFHDRRRDQVLPFQAAAPLNYHYAYRLDTGDSTLTNEPSEQFANKFMQMTPFTRWRLRLSASAKENAGLAFPTATALDSTTQIVITFHVTAIRQIDWRHDEE

SEQ ID NO: 342 - protein, 867 aa, Artificial Sequence
  Synthetic
MALVDYGKLFEDLNQISMGVLDRVEFSEVMVIHRMYVRLADLNVGQLEGAEKVKRLYVFADVVELPVVEWRWPPQIPGSVTVIILCRLLQWPTDGRQSDTELHLTFMKLHAIQREENRWEITAADGMNWGVYIHAEEVQVGVLTMSWSSVLRVSALRSVITSGFRAVSVFEVPGSVRSTLGATLRPDHALYSTTMQATPNASHISAFNLRIVSPSAYRVCPLQNDTDTYLGIPADVAAVLPVDVVTDPNILLGMQTTVHIAELVKACHPSPDVVSAVGEHLNWLNKLLLPLKESTQLQGSESYKECLALLGRVHAAMKMVRIGLVVPQLQYRMYGSLINQMAQVAQNYDREFKQFKLFIIQNQILGSYLLQQNRAFAERELQMESFHAAVISQRREELDNTFAKMDRLSGQMEAESSAMEQAKKEMDEGLRQFQNRQVANALFAVLSAVAQIGLAFLTAGATAPGAVASAGQAVSIAGQAAQGLRRVVEILEQLEAVMEVVAAVKDLVDSLEQVGQIVDAPVMPELPSEADWSIFVNEVEAVAEGMPTEVSEVPVWLARCKNVAALGREMSITAVQMSELQYDIWVQGMMRDMARSQADRLAAIQPADLTNYLEMATQMDMRTTRMLLGLLNILRIQNAALRYEYLLMPTELTTWPLGMDTVGDLLIAQENAALIGLMQLGPSSDFTSRHVVKDIPVNLLLDGEDWEFEIPVQAGMSSFPSSWSRVRIRHLEMHFVKEASGIGGEIIHQPTTQTGTVYILLQGSTIFHDRRRDQVLPFQAAAPLNYHYAYRLDTGDSTLTNEPSEQFANKFMQMTPFTRWRLRLSASAKENAGLAFPTATALDSTTQIVITFHVTAIRQIDWRHDEE

SEQ ID NO: 343 - protein, 867 aa, Artificial Sequence
  Synthetic
MALVDYGKLFEDLNQISMGVLDRVEFSEVMVIHRMYVRLADLNVGQLEGAEKVKRLYVFADVVELPVVEWRWPPQIPGSVTVIILCRLLQWPTDGRQSDTELHLTFMKLHAIQREENRWEITAADGMNWGVYIHAEEVQVGVLTMSWSSVLRVSALRSVITSGFRAVSVFEVPGSVRSTLGATLRPDHALYSTTMQATPNASHISAFNLRIVSPSAYRVCPLQNDTDTYLGIPADVAAVLPVDVVTDPNILLGMQTTVHIAELVKACHPSPDVVSAVGEHLNWLNKLLLPLKESTQLQGSESYKECLALLGRVHAAMKMVRIGLVVPQLQYRMYGSLINQMAQVAQNYDREFKQFKLFIIQNQILGSYLLQQNRAFAERELQMESFHAAVISQRREELDNTFAKMDRLSGQMEAESSAMEQAKKEMDEGLRQFQNRQVANALFAVLSAVAQIGLAFLTAGATAPGAVASAGQAVSIAGQAAQGLRRVVEILEQLEAVMEVVAAVKDLVDSLEQVGQIVDAPVMPELPSEADWSIFVNEVEAVAEGMPTEVSEVPVWLARCKSVAALGREMSITAVQMSELQYDIWVQGMMRDMARSQADRLAAIQPADLTNYLEMATQMDMRTTRMLLGLLNILRIQNAALRYEYLLMPTELTTWPLGMDTVGDLLIAQENAALIGLMQLGPSSDFTSRHVVKDIPVNLLLDGEDWEFEIPVQAGMSSFPSSWSRVRIRHLEMHFVKEASGIGGEIIHQPTTQTGTVYILLQGSTIFHDRRRDQVLPFQAAAPLNYHYAYRLDTGDSTLTNEPSEQFANKFMQMTPFTRWRLRLSASAKENAGLAFPTATALDSTTQIVITFHVTAIRQIDWRHDEE

SEQ ID NO: 344 - protein, 867 aa, Artificial Sequence
  Synthetic
MALVDYGKLFEDLNQISMGVLDRVEFSEVMVIHRMYVRLADLNVGQLEGAEKVKRLYVFADVVELPVVEWRWPPQIPGSVTVIILCRLLQWPTDGRQSDTELHLTFMKLHAIQREENRWEITAADGMNWGVYIHAEEVQVGVLTMSWSSVLRVSALRSVITSGFRAVSVFEVPGSVRSTLGATLRPDHALYSTTMQATPNASHISAFNLRIVSPSAYRVCPLQNDTDTYLGIPADVAAVLPVDVVTDPNILLGMQTTVHIAELVKACHPSPDVVSAVGEHLNWLNKLLLPLKESTQLQGSESYKECLALLGRVHAAMKMVRIGLVVPQLQYRMYGSLINQMAQVAQNYDREFKQFKLFIIQNQILGSYLLQQNRAFAERELQMESFHAAVISQRREELDNTFAKMDRLSGQMEAESSAMEQAKKEMDEGLRQFQNRQVANALFAVLSAVAQIGLAFLTAGATAPGAVASAGQAVSIAGQAAQGLRRVVEILEQLEAVMEVVAAVKDLVDSLEQVGQIVDAPVMPELPSEADWSIFVNEVEAVAEGMPTEVSEVPVWLGRCKNVAALGREMSITAVQMSELQYDIWVQGMMRDMARSQADRLAAIQPADLTNYLEMATQMDMRTTRMLLGLLNILRIQNAALRYEYLLMPTELTTWPLGMDTVGDLLIAQENAALIGLMQLGPSSDFTSRHVVKDIPVNLLLDGEDWEFEIPVQAGMSSFPSSWSRVRIRHLEMHFVKEASGIGGEIIHQPTTQTGTVYILLQGSTIFHDRRRDQVLPFQAAAPLNYHYAYRLDTGDSTLTNEPSEQFANKFMQMTPFTRWRLRLSASAKENAGLAFPTATALDSTTQIVITFHVTAIRQIDWRHDEE

SEQ ID NO: 345 - protein, 867 aa, Artificial Sequence
  Synthetic
MALVDYGKLFEDLNQISMGVLDRVEFSEVMVIHRMYVRLADLNVGQLEGAEKVKRLYVFADVVELPVVEWRWPPQIPGSVTVIILCRLLQWPTDGRQSDTELHLTFMKLHAIQREENRWEITAADGMNWGVYIHAEEVQVGVLTMSWSSVLRVSALRSVITSGFRAVSVFEVPGSVRSTLGATLRPDHALYSTTMQATPNASHISAFNLRIVSPSAYRVCPLQNDTDTYLGIPADVAAVLPVDVVTDPNILLGMQTTVHIAELVKACHPSPDVVSAVGEHLNWLNKLLLPLKESTQLQGSESYKECLALLGRVHAAMKMVRIGLVVPQLQYRMYGSLINQMAQVAQNYDREFKQFKLFIIQNQILGSYLLQQNRAFAERELQMESFHAAVISQRREELDNTFAKMDRLSGQMEAESSAMEQAKKEMDEGLRQFQNRQVANALFAVLSAVAQIGLAFLTAGATAPGAVASAGQAVSIAGQAAQGLRRVVEILEQLEAVMEVVAAVKDLVDSLEQVGQIVDAPVMPELPSEADWSIFVNEVEAVAEGMPTEVSEVPVWLGRCKSVAALGREMSITAVQMSELQYDIWVQGMMRDMARSQADRLAAIQPADLTNYLEMATQMDMRTTRMLLGLLNILRIQNAALRYEYLLMPTELTTWPLGMDTVGDLLIAQENAALIGLMQLGPSSDFTSRHVVKDIPVNLLLDGEDWEFEIPVQAGMSSFPSSWSRVRIRHLEMHFVKEASGIGGEIIHQPTTQTGTVYILLQGSTIFHDRRRDQVLPFQAAAPLNYHYAYRLDTGDSTLTNEPSEQFANKFMQMTPFTRWRLRLSASAKENAGLAFPTATALDSTTQIVITFHVTAIRQIDWRHDEE

SEQ ID NO: 346 - protein, 867 aa, Artificial Sequence
  Synthetic
MALVDYGKLFEDLNQISMGVLDRVEFSEVMVIHRMYVRLADLNVGQLEGAEKVKRLYVFADVVELPVVEWRWPPQIPGSVTVIILCRLLQWPTDGRQSDTELHLTFMKLHAIQREENRWEITAADGMNWGVYIHAEEVQVGVLTMSWSSVLRVSALRSVITSGFRAVSVFEVPGSVRSTLGATLRPDHALYSTTMQATPNASHISAFNLRIVSPSAYRVCPLQNDTDTYLGIPADVAAVLPVDVVTDPNILLGMQTTVHIAELVKACHPSPDVVSAVGEHLNWLNKLLLPLKESTQLQGSESYKECLALLGRVHAAMKMVRIGLVVPQLQYRMYGSLINQMAQVAQNYDREFKQFKLFIIQNQILGSYLLQQNRAFAERELQMESFHAAVISQRREELDNTFAKMDRLSGQMEAESSAMEQAKKEMDEGLRQFQNRQVANALFAVLSAVAQIGLAFLTAGATAPGAVASAGQAVSIAGQAAQGLRRVVEILEQLEAVMEVVAAVKDLVDSLEQVGQIVDAPVMPELPSEADWSIFVNEVEAVAEGMPTEVSEVPVWLVKCKCVAALGREMSITAVQMSELQYDIWVQGMMRDMARSQADRLAAIQPADLTNYLEMATQMDMRTTRMLLGLLNILRIQNAALRYEYLLMPTELTTWPLGMDTVGDLLIAQENAALIGLMQLGPSSDFTSRHVVKDIPVNLLLDGEDWEFEIPVQAGMSSFPSSWSRVRIRHLEMHFVKEASGIGGEIIHQPTTQTGTVYILLQGSTIFHDRRRDQVLPFQAAAPLNYHYAYRLDTGDSTLTNEPSEQFANKFMQMTPFTRWRLRLSASAKENAGLAFPTATALDSTTQIVITFHVTAIRQIDWRHDEE

SEQ ID NO: 347 - protein, 867 aa, Artificial Sequence
  Synthetic
MALVDYGKLFEDLNQISMGVLDRVEFSEVMVIHRMYVRLADLNVGQLEGAEKVKRLYVFADVVELPVVEWRWPPQIPGSVTVIILCRLLQWPTDGRQSDTELHLTFMKLHAIQREENRWEITAADGMNWGVYIHAEEVQVGVLTMSWSSVLRVSALRSVITSGFRAVSVFEVPGSVRSTLGATLRPDHALYSTTMQATPNASHISAFNLRIVSPSAYRVCPLQNDTDTYLGIPADVAAVLPVDVVTDPNILLGMQTTVHIAELVKACHPSPDVVSAVGEHLNWLNKLLLPLKESTQLQGSESYKECLALLGRVHAAMKMVRIGLVVPQLQYRMYGSLINQMAQVAQNYDREFKQFKLFIIQNQILGSYLLQQNRAFAERELQMESFHAAVISQRREELDNTFAKMDRLSGQMEAESSAMEQAKKEMDEGLRQFQNRQVANALFAVLSAVAQIGLAFLTAGATAPGAVASAGQAVSIAGQAAQGLRRVVEILEQLEAVMEVVSAVKDLVDSLEQVGQIVDAPVMPELPSEADWSIFVNEVEAVAEGMPTEVSEVPVWMAKCKNVAALGREMSITAVQMSELQYDIWVQGMMRDMARSQADRLAAIQPADLTNYLEMATQMDMRTTRMLLGLLNILRIQNAALRYEYLLMPTELTTWPLGMDTVGDLLIAQENAALIGLMQLGPSSDFTSRHVVKDIPVNLLLDGEDWEFEIPVQAGMSSFPSSWSRVRIRHLEMHFVKEASGIGGEIIHQPTTQTGTVYILLQGSTIFHDRRRDQVLPFQAAAPLNYHYAYRLDTGDSTLTNEPSEQFANKFMQMTPFTRWRLRLSASAKENAGLAFPTATALDSTTQIVITFHVTAIRQIDWRHDEE

SEQ ID NO: 348 - protein, 867 aa, Artificial Sequence
  Synthetic
MALVDYGKLFEDLNQISMGVLDRVEFSEVMVIHRMYVRLADLNVGQLEGAEKVKRLYVFADVVELPVVEWRWPPQIPGSVTVIILCRLLQWPTDGRQSDTELHLTFMKLHAIQREENRWEITAADGMNWGVYIHAEEVQVGVLTMSWSSVLRVSALRSVITSGFRAVSVFEVPGSVRSTLGATLRPDHALYSTTMQATPNASHISAFNLRIVSPSAYRVCPLQNDTDTYLGIPADVAAVLPVDVVTDPNILLGMQTTVHIAELVKACHPSPDVVSAVGEHLNWLNKLLLPLKESTQLQGSESYKECLALLGRVHAAMKMVRIGLVVPQLQYRMYGSLINQMAQVAQNYDREFKQFKLFIIQNQILGSYLLQQNRAFAERELQMESFHAAVISQRREELDNTFAKMDRLSGQMEAESSAMEQAKKEMDEGLRQFQNRQVANALFAVLSAVAQIGLAFLTAGATAPGAVASAGQAVSIAGQAAQGLRRVVEILEQLEAVMEVVAAVKDLVDSLEQVGQIVDAPVMPELPSEADWSIFVNEVEAVAEGMPTEVSEVPVWMGRCKSVAALGREMSITAVQMSELQYDIWVQGMMRDMARSQADRLAAIQPADLTNYLEMATQMDMRTTRMLLGLLNILRIQNAALRYEYLLMPTELTTWPLGMDTVGDLLIAQENAALIGLMQLGPSSDFTSRHVVKDIPVNLLLDGEDWEFEIPVQAGMSSFPSSWSRVRIRHLEMHFVKEASGIGGEIIHQPTTQTGTVYILLQGSTIFHDRRRDQVLPFQAAAPLNYHYAYRLDTGDSTLTNEPSEQFANKFMQMTPFTRWRLRLSASAKENAGLAFPTATALDSTTQIVITFHVTAIRQIDWRHDEE

SEQ ID NO: 349 - protein, 867 aa, Artificial Sequence
  Synthetic
MALVDYGKLFEDLNQISMGVLDRVEFSEVMVIHRMYVRLADLNVGQLEGAEKVKRLYVFADVVELPVVEWRWPPQIPGSVTVIILCRLLQWPTDGRQSDTELHLTFMKLHAIQREENRWEITAADGMNWGVYIHAEEVQVGVLTMSWSSVLRVSALRSVITSGFRAVSVFEVPGSVRSTLGATLRPDHALYSTTMQATPNASHISAFNLRIVSPSAYRVCPLQNDTDTYLGIPADVAAVLPVDVVTDPNILLGMQTTVHIAELVKACHPSPDVVSAVGEHLNWLNKLLLPLKESTQLQGSESYKECLALLGRVHAAMKMVRIGLVVPQLQYRMYGSLINQMAQVAQNYDREFKQFKLFIIQNQILGSYLLQQNRAFAERELQMESFHAAVISQRREELDNTFAKMDRLSGQMEAESSAMEQAKKEMDEGLRQFQNRQVANALFAVLSAVAQIGLAFLTAGATAPGAVASAGQAVSIAGQAAQGLRRVVEILEQLEAVMEVVAAVKDLVDSLEQVGQIVDAPVMPELPSEADWSIFVNEVEAVAEGMPTEVSEVPVWMVKCKNVAALGREMSITAVQMSELQYDIWVQGMMRDMARSQADRLAAIQPADLTNYLEMATQMDMRTTRMLLGLLNILRIQNAALRYEYLLMPTELTTWPLGMDTVGDLLIAQENAALIGLMQLGPSSDFTSRHVVKDIPVNLLLDGEDWEFEIPVQAGMSSFPSSWSRVRIRHLEMHFVKEASGIGGEIIHQPTTQTGTVYILLQGSTIFHDRRRDQVLPFQAAAPLNYHYAYRLDTGDSTLTNEPSEQFANKFMQMTPFTRWRLRLSASAKENAGLAFPTATALDSTTQIVITFHVTAIRQIDWRHDEE

SEQ ID NO: 350 - protein, 867 aa, Artificial Sequence
  Synthetic
MALVDYGKLFEDLNQISMGVLDRVEFSEVMVIHRMYVRLADLNVGQLEGAEKVKRLYVFADVVELPVVEWRWPPQIPGSVTVIILCRLLQWPTDGRQSDTELHLTFMKLHAIQREENRWEITAADGMNWGVYIHAEEVQVGVLTMSWSSVLRVSALRSVITSGFRAVSVFEVPGSVRSTLGATLRPDHALYSTTMQATPNASHISAFNLRIVSPSAYRVCPLQNDTDTYLGIPADVAAVLPVDVVTDPNILLGMQTTVHIAELVKACHPSPDVVSAVGEHLNWLNKLLLPLKESTQLQGSESYKECLALLGRVHAAMKMVRIGLVVPQLQYRMYGSLINQMAQVAQNYDREFKQFKLFIIQNQILGSYLLQQNRAFAERELQMESFHAAVISQRREELDNTFAKMDRLSGQMEAESSAMEQAKKEMDEGLRQFQNRQVANALFAVLSAVAQIGLAFLTAGATAPGAVASAGQAVSIAGQAAQGLRRVVEILEQLEAVMEVVAAVKDLVDSLEQVGQIVDAPVMPELPSEADWSIFVNEVEAVAEGMPTEVSEVPVWMVKCKSVAALGREMSITAVQMSELQYDIWVQGMMRDMARSQADRLAAIQPADLTNYLEMATQMDMRTTRMLLGLLNILRIQNAALRYEYLLMPTELTTWPLGMDTVGDLLIAQENAALIGLMQLGPSSDFTSRHVVKDIPVNLLLDGEDWEFEIPVQAGMSSFPSSWSRVRIRHLEMHFVKEASGIGGEIIHQPTTQTGTVYILLQGSTIFHDRRRDQVLPFQAAAPLNYHYAYRLDTGDSTLTNEPSEQFANKFMQMTPFTRWRLRLSASAKENAGLAFPTATALDSTTQIVITFHVTAIRQIDWRHDEE

SEQ ID NO: 351 - protein, 867 aa, Artificial Sequence
  Synthetic
MALVDYGKLFEDLNQISMGVLDRVEFSEVMVIHRMYVRLADLNVGQLEGAEKVKRLYVFADVVELPVVEWRWPPQIPGSVTVIILCRLLQWPTDGRQSDTELHLTFMKLHAIQREENRWEITAADGMNWGVYIHAEEVQVGVLTMSWSSVLRVSALRSVITSGFRAVSVFEVPGSVRSTLGATLRPDHALYSTTMQATPNASHISAFNLRIVSPSAYRVCPLQNDTDTYLGIPADVAAVLPVDVVTDPNILLGMQTTVHIAELVKACHPSPDVVSAVGEHLNWLNKLLLPLKESTQLQGSESYKECLALLGRVHAAMKMVRIGLVVPQLQYRMYGSLINQMAQVAQNYDREFKQFKLFIIQNQILGSYLLQQNRAFAERELQMESFHAAVISQRREELDNTFAKMDRLSGQMEAESSAMEQAKKEMDEGLRQFQNRQVANALFAVLSAVAQIGLAFLTAGATAPGAVASAGQAVSIAGQAAQGLRRVVEILEQLEAVMEVVAAVKDLVDSLEQVGQIVDAPVMPELPSEADWSIFVNEVEAVAEGMPTEVSEVPVWMVRCKNVAALGREMSITAVQMSELQYDIWVQGMMRDMARSQADRLAAIQPADLTNYLEMATQMDMRTTRMLLGLLNILRIQNAALRYEYLLMPTELTTWPLGMDTVGDLLIAQENAALIGLMQLGPSSDFTSRHVVKDIPVNLLLDGEDWEFEIPVQAGMSSFPSSWSRVRIRHLEMHFVKEASGIGGEIIHQPTTQTGTVYILLQGSTIFHDRRRDQVLPFQAAAPLNYHYAYRLDTGDSTLTNEPSEQFANKFMQMTPFTRWRLRLSASAKENAGLAFPTATALDSTTQIVITFHVTAIRQIDWRHDEE

SEQ ID NO: 352 - protein, 867 aa, Artificial Sequence
  Synthetic
MALVDYGKLFEDLNQISMGVLDRVEFSEVMVIHRMYVRLADLNVGQLEGAEKVKRLYVFADVVELPVVEWRWPPQIPGSVTVIILCRLLQWPTDGRQSDTELHLTFMKLHAIQREENRWEITAADGMNWGVYIHAEEVQVGVLTMSWSSVLRVSALRSVITSGFRAVSVFEVPGSVRSTLGATLRPDHALYSTTMQATPNASHISAFNLRIVSPSAYRVCPLQNDTDTYLGIPADVAAVLPVDVVTDPNILLGMQTTVHIAELVKACHPSPDVVSAVGEHLNWLNKLLLPLKESTQLQGSESYKECLALLGRVHAAMKMVRIGLVVPQLQYRMYGSLINQMAQVAQNYDREFKQFKLFIIQNQILGSYLLQQNRAFAERELQMESFHAAVISQRREELDNTFAKMDRLSGQMEAESSAMEQAKKEMDEGLRQFQNRQVANALFAVLSAVAQIGLAFLTAGATAPGAVASAGQAVSIAGQAAQGLRRVVEILEQLEAVMEVVAAVKDLVDSLEQVGQIVDAPVMPELPSEADWSIFVNEVEAVAEGMPTEVSEVPVWQARCKHVAALGREMSITAVQMSELQYDIWVQGMMRDMARSQADRLAAIQPADLTNYLEMATQMDMRTTRMLLGLLNILRIQNAALRYEYLLMPTELTTWPLGMDTVGDLLIAQENAALIGLMQLGPSSDFTSRHVVKDIPVNLLLDGEDWEFEIPVQAGMSSFPSSWSRVRIRHLEMHFVKEASGIGGEIIHQPTTQTGTVYILLQGSTIFHDRRRDQVLPFQAAAPLNYHYAYRLDTGDSTLTNEPSEQFANKFMQMTPFTRWRLRLSASAKENAGLAFPTATALDSTTQIVITFHVTAIRQIDWRHDEE

SEQ ID NO: 353 - protein, 867 aa, Artificial Sequence
  Synthetic
MALVDYGKLFEDLNQISMGVLDRVEFSEVMVIHRMYVRLADLNVGQLEGAEKVKRLYVFADVVELPVVEWRWPPQIPGSVTVIILCRLLQWPTDGRQSDTELHLTFMKLHAIQREENRWEITAADGMNWGVYIHAEEVQVGVLTMSWSSVLRVSALRSVITSGFRAVSVFEVPGSVRSTLGATLRPDHALYSTTMQATPNASHISAFNLRIVSPSAYRVCPLQNDTDTYLGIPADVAAVLPVDVVTDPNILLGMQTTVHIAELVKACHPSPDVVSAVGEHLNWLNKLLLPLKESTQLQGSESYKECLALLGRVHAAMKMVRIGLVVPQLQYRMYGSLINQMAQVAQNYDREFKQFKLFIIQNQILGSYLLQQNRAFAERELQMESFHAAVISQRREELDNTFAKMDRLSGQMEAESSAMEQAKKEMDEGLRQFQNRQVANALFAVLSAVAQIGLAFLTAGATAPGAVASAGQAVSIAGQAAQGLRRVVEILEQLEAVMEVVAAVNDLVDSLEQVGQIVDAPVMPELPSEADWSIFVNEVEAVAEGMPTEVSEVPVWQARCKNVAALGREMSITAVQMSELQYDIWVQGMMRDMARSQADRLAAIQPADLTNYLEMATQMDMRTTRMLLGLLNILRIQNAALRYEYLLMPTELTTWPLGMDTVGDLLIAQENAALIGLMQLGPSSDFTSRHVVKDIPVNLLLDGEDWEFEIPVQAGMSSFPSSWSRVRIRHLEMHFVKEASGIGGEIIHQPTTQTGTVYILLQGSTIFHDRRRDQVLPFQAAAPLNYHYAYRLDTGDSTLTNEPSEQFANKFMQMTPFTRWRLRLSASAKENAGLAFPTATALDSTTQIVITFHVTAIRQIDWRHDEE

SEQ ID NO: 354 - protein, 867 aa, Artificial Sequence
  Synthetic
MALVDYGKLFEDLNQISMGVLDRVEFSEVMVIHRMYVRLADLNVGQLEGAEKVKRLYVFADVVELPVVEWRWPPQIPGSVTVIILCRLLQWPTDGRQSDTELHLTFMKLHAIQREENRWEITAADGMNWGVYIHAEEVQVGVLTMSWSSVLRVSALRSVITSGFRAVSVFEVPGSVRSTLGATLRPDHALYSTTMQATPNASHISAFNLRIVSPSAYRVCPLQNDTDTYLGIPADVAAVLPVDVVTDPNILLGMQTTVHIAELVKACHPSPDVVSAVGEHLNWLNKLLLPLKESTQLQGSESYKECLALLGRVHAAMKMVRIGLVVPQLQYRMYGSLINQMAQVAQNYDREFKQFKLFIIQNQILGSYLLQQNRAFAERELQMESFHAAVISQRREELDNTFAKMDRLSGQMEAESSAMEQAKKEMDEGLRQFQNRQVANALFAVLSAVAQIGLAFLTAGATAPGAVASAGQAVSIAGQAAQGLRRVVEILEQLEAVMEVVAAVKDLVDSLEQVGQIVDAPVMPELPSEADWSIFVNEVEAVAEGMPTEVSEVPVWQGRCKNVAALGREMSITAVQMSELQYDIWVQGMMRDMARSQADRLAAIQPADLTNYLEMATQMDMRTTRMLLGLLNILRIQNAALRYEYLLMPTELTTWPLGMDTVGDLLIAQENAALIGLMQLGPSSDFTSRHVVKDIPVNLLLDGEDWEFEIPVQAGMSSFPSSWSRVRIRHLEMHFVKEASGIGGEIIHQPTTQTGTVYILLQGSTIFHDRRRDQVLPFQAAAPLNYHYAYRLDTGDSTLTNEPSEQFANKFMQMTPFTRWRLRLSASAKENAGLAFPTATALDSTTQIVITFHVTAIRQIDWRHDEE

SEQ ID NO: 355 - protein, 867 aa, Artificial Sequence
  Synthetic
MALVDYGKLFEDLNQISMGVLDRVEFSEVMVIHRMYVRLADLNVGQLEGAEKVKRLYVFADVVELPVVEWRWPPQIPGSVTVIILCRLLQWPTDGRQSDTELHLTFMKLHAIQREENRWEITAADGMNWGVYIHAEEVQVGVLTMSWSSVLRVSALRSVITSGFRAVSVFEVPGSVRSTLGATLRPDHALYSTTMQATPNASHISAFNLRIVSPSAYRVCPLQNDTDTYLGIPADVAAVLPVDVVTDPNILLGMQTTVHIAELVKACHPSPDVVSAVGEHLNWLNKLLLPLKESTQLQGSESYKECLALLGRVHAAMKMVRIGLVVPQLQYRMYGSLINQMAQVAQNYDREFKQFKLFIIQNQILGSYLLQQNRAFAERELQMESFHAAVISQRREELDNTFAKMDRLSGQMEAESSAMEQAKKEMDEGLRQFQNRQVANALFAVLSAVAQIGLAFLTAGATAPGAVASAGQAVSIAGQAAQGLRRVVEILEQLEAVMEVVAAVKDLVDSLEQVGQIVDAPVMPELPSEADWSIFVNEVEAVAEGMPTEVSEVPVWQVRCKSVAALGREMSITAVQMSELQYDIWVQGMMRDMARSQADRLAAIQPADLTNYLEMATQMDMRTTRMLLGLLNILRIQNAALRYEYLLMPTELTTWPLGMDTVGDLLIAQENAALIGLMQLGPSSDFTSRHVVKDIPVNLLLDGEDWEFEIPVQAGMSSFPSSWSRVRIRHLEMHFVKEASGIGGEIIHQPTTQTGTVYILLQGSTIFHDRRRDQVLPFQAAAPLNYHYAYRLDTGDSTLTNEPSEQFANKFMQMTPFTRWRLRLSASAKENAGLAFPTATALDSTTQIVITFHVTAIRQIDWRHDEE

SEQ ID NO: 356 - protein, 867 aa, Artificial Sequence
  Synthetic
MALVDYGKLFEDLNQISMGVLDRVEFSEVMVIHRMYVRLADLNVGQLEGAEKVKRLYVFADVVELPVVEWRWPPQIPGSVTVIILCRLLQWPTDGRQSDTELHLTFMKLHAIQREENRWEITAADGMNWGVYIHAEEVQVGVLTMSWSSVLRVSALRSVITSGFRAVSVFEVPGSVRSTLGATLRPDHALYSTTMQATPNASHISAFNLRIVSPSAYRVCPLQNDTDTYLGIPADVAAVLPVDVVTDPNILLGMQTTVHIAELVKACHPSPDVVSAVGEHLNWLNKLLLPLKESTQLQGSESYKECLALLGRVHAAMKMVRIGLVVPQLQYRMYGSLINQMAQVAQNYDREFKQFKLFIIQNQILGSYLLQQNRAFAERELQMESFHAAVISQRREELDNTFAKMDRLSGQMEAESSAMEQAKKEMDEGLRQFQNRQVANALFAVLSAVAQIGLAFLTAGATAPGAVASAGQAVSIAGQAAQGLRRVVEILEQLEAVMEVVAAVKDLVDSLEQVGQIVDAPVMPELPSEADWSIFVNEVEAVAEGMPTEVSEVPVWRARCKNVAALGREMSIAAVQMSELQYDIWVQGMMRDMARSQADRLAAIQPADLTNYLEMATQMDMRTTRMLLGLLNILRIQNAALRYEYLLMPTELTTWPLGMDTVGDLLIAQENAALIGLMQLGPSSDFTSRHVVKDIPVNLLLDGEDWEFEIPVQAGMSSFPSSWSRVRIRHLEMHFVKEASGIGGEIIHQPTTQTGTVYILLQGSTIFHDRRRDQVLPFQAAAPLNYHYAYRLDTGDSTLTNEPSEQFANKFMQMTPFTRWRLRLSASAKENAGLAFPTATALDSTTQIVITFHVTAIRQIDWRHDEE

SEQ ID NO: 357 - protein, 867 aa, Artificial Sequence
  Synthetic
MALVDYGKLFEDLNQISMGVLDRVEFSEVMVIHRMYVRLADLNVGQLEGAEKVKRLYVFADVVELPVVEWRWPPQIPGSVTVIILCRLLQWPTDGRQSDTELHLTFMKLHAIQREENRWEITAADGMNWGVYIHAEEVQVGVLTMSWSSVLRVSALRSVITSGFRAVSVFEVPGSVRSTLGATLRPDHALYSTTMQATPNASHISAFNLRIVSPSAYRVCPLQNDTDTYLGIPADVAAVLPVDVVTDPNILLGMQTTVHIAELVKACHPSPDVVSAVGEHLNWLNKLLLPLKESTQLQGSESYKECLALLGRVHAAMKMVRIGLVVPQLQYRMYGSLINQMAQVAQNYDREFKQFKLFIIQNQILGSYLLQQNRAFAERELQMESFHAAVISQRREELDNTFAKMDRLSGQMEAESSAMEQAKKEMDEGLRQFQNRQVANALFAVLSAVAQIGLAFLTAGATAPGAVASAGQAVSIAGQAAQGLRRVVEILEQLEAVMEVVAAVKDLVDSLEQVGQIVDAPVMPELPSEADWSIFVNEVEAVAEGMPTEVSEVPVWRGKCKSVAALGREMSITAVQMSELQYDIWVQGMMRDMARSQADRLAAIQPADLTNYLEMATQMDMRTTRMLLGLLNILRIQNAALRYEYLLMPTELTTWPLGMDTVGDLLIAQENAALIGLMQLGPSSDFTSRHVVKDIPVNLLLDGEDWEFEIPVQAGMSSFPSSWSRVRIRHLEMHFVKEASGIGGEIIHQPTTQTGTVYILLQGSTIFHDRRRDQVLPFQAAAPLNYHYAYRLDTGDSTLTNEPSEQFANKFMQMTPFTRWRLRLSASAKENAGLAFPTATALDSTTQIVITFHVTAIRQIDWRHDEE

SEQ ID NO: 358 - protein, 867 aa, Artificial Sequence
  Synthetic
MALVDYGKLFEDLNQISMGVLDRVEFSEVMVIHRMYVRLADLNVGQLEGAEKVKRLYVFADVVELPVVEWRWPPQIPGSVTVIILCRLLQWPTDGRQSDTELHLTFMKLHAIQREENRWEITAADGMNWGVYIHAEEVQVGVLTMSWSSVLRVSALRSVITSGFRAVSVFEVPGSVRSTLGATLRPDHALYSTTMQATPNASHISAFNLRIVSPSAYRVCPLQNDTDTYLGIPADVAAVLPVDVVTDPNILLGMQTTVHIAELVKACHPSPDVVSAVGEHLNWLNKLLLPLKESTQLQGSESYKECLALLGRVHAAMKMVRIGLVVPQLQYRMYGSLINQMAQVAQNYDREFKQFKLFIIQNQILGSYLLQQNRAFAERELQMESFHAAVISQRREELDNTFAKMDRLSGQMEAESSAMEQAKKEMDEGLRQFQNRQVANALFAVLSAVAQIGLAFLTAGATAPGAVASAGQAVSIAGQAAQGLRRVVEILEQLEAVMEVVAAVKDLVDSLEQVGQIVDAPVMPELPSEADWSIFVNEVEAVAEGMPTEVSEVPVWRGRCKTVAALGREMSITAVQMSELQYDIWVQGMMRDMARSQADRLAAIQPADLTNYLEMATQMDMRTTRMLLGLLNILRIQNAALRYEYLLMPTELTTWPLGMDTVGDLLIAQENAALIGLMQLGPSSDFTSRHVVKDIPVNLLLDGEDWEFEIPVQAGMSSFPSSWSRVRIRHLEMHFVKEASGIGGEIIHQPTTQTGTVYILLQGSTIFHDRRRDQVLPFQAAAPLNYHYAYRLDTGDSTLTNEPSEQFANKFMQMTPFTRWRLRLSASAKENAGLAFPTATALDSTTQIVITFHVTAIRQIDWRHDEE

SEQ ID NO: 359 - protein, 867 aa, Artificial Sequence
  Synthetic
MALVDYGKLFEDLNQISMGVLDRVEFSEVMVIHRMYVRLADLNVGQLEGAEKVKRLYVFADVVELPVVEWRWPPQIPGSVTVIILCRLLQWPTDGRQSDTELHLTFMKLHAIQREENRWEITAADGMNWGVYIHAEEVQVGVLTMSWSSVLRVSALRSVITSGFRAVSVFEVPGSVRSTLGATLRPDHALYSTTMQATPNASHISAFNLRIVSPSAYRVCPLQNDTDTYLGIPADVAAVLPVDVVTDPNILLGMQTTVHIAELVKACHPSPDVVSAVGEHLNWLNKLLLPLKESTQLQGSESYKECLALLGRVHAAMKMVRIGLVVPQLQYRMYGSLINQMAQVAQNYDREFKQFKLFIIQNQILGSYLLQQNRAFAERELQMESFHAAVISQRREELDNTFAKMDRLSGQMEAESSAMEQAKKEMDEGLRQFQNRQVANALFAVLSAVAQIGLAFLTAGATAPGAVASAGQAVSIAGQAAQGLRRVVEILEQLEAVMEVVAAVKDLVDSLEQVGQIVDAPVMPELPSEADWSIFVNEVEAVAEGMPTEVSEVPVWSARCKSVAALGREMSITAVQMSELQYDIWVQGMMRDMARSQADRLAAIQPADLTNYLEMATQMDMRTTRMLLGLLNILRIQNAALRYEYLLMPTELTTWPLGMDTVGDLLIAQENAALIGLMQLGPSSDFTSRHVVKDIPVNLLLDGEDWEFEIPVQAGMSSFPSSWSRVRIRHLEMHFVKEASGIGGEIIHQPTTQTGTVYILLQGSTIFHDRRRDQVLPFQAAAPLNYHYAYRLDTGDSTLTNEPSEQFANKFMQMTPFTRWRLRLSASAKENAGLAFPTATALDSTTQIVITFHVTAIRQIDWRHDEE

SEQ ID NO: 360 - protein, 867 aa, Artificial Sequence
  Synthetic
MALVDYGKLFEDLNQISMGVLDRVEFSEVMVIHRMYVRLADLNVGQLEGAEKVKRLYVFADVVELPVVEWRWPPQIPGSVTVIILCRLLQWPTDGRQSDTELHLTFMKLHAIQREENRWEITAADGMNWGVYIHAEEVQVGVLTMSWSSVLRVSALRSVITSGFRAVSVFEVPGSVRSTLGATLRPDHALYSTTMQATPNASHISAFNLRIVSPSAYRVCPLQNDTDTYLGIPADVAAVLPVDVVTDPNILLGMQTTVHIAELVKACHPSPDVVSAVGEHLNWLNKLLLPLKESTQLQGSESYKECLALLGRVHAAMKMVRIGLVVPQLQYRMYGSLINQMAQVAQNYDREFKQFKLFIIQNQILGSYLLQQNRAFAERELQMESFHAAVISQRREELDNTFAKMDRLSGQMEAESSAMEQAKKEMDEGLRQFQNRQVANALFAVLSAVAQIGLAFLTAGATAPGAVASAGQAVSIAGQAAQGLRRVVEILEQLEAVMEVVAAVKDLVDSLEQVGQIVDAPVMPELPSEADWSIFVNEVEAVAEGMPTEVSEVPVWSVKCKHVAALGREMSITAVQMSELQYDIWVQGMMRDMARSQADRLAAIQPADLTNYLEMATQMDMRTTRMLLGLLNILRIQNAALRYEYLLMPTELTTWPLGMDTVGDLLIAQENAALIGLMQLGPSSDFTSRHVVKDIPVNLLLDGEDWEFEIPVQAGMSSFPSSWSRVRIRHLEMHFVKEASGIGGEIIHQPTTQTGTVYILLQGSTIFHDRRRDQVLPFQAAAPLNYHYAYRLDTGDSTLTNEPSEQFANKFMQMTPFTRWRLRLSASAKENAGLAFPTATALDSTTQIVITFHVTAIRQIDWRHDEE

SEQ ID NO: 361 - protein, 867 aa, Artificial Sequence
  Synthetic
MALVDYGKLFEDLNQISMGVLDRVEFSEVMVIHRMYVRLADLNVGQLEGAEKVKRLYVFADVVELPVVEWRWPPQIPGSVTVIILCRLLQWPTDGRQSDTELHLTFMKLHAIQREENRWEITAADGMNWGVYIHAEEVQVGVLTMSWSSVLRVSALRSVITSGFRAVSVFEVPGSVRSTLGATLRPDHALYSTTMQATPNASHISAFNLRIVSPSAYRVCPLQNDTDTYLGIPADVAAVLPVDVVTDPNILLGMQTTVHIAELVKACHPSPDVVSAVGEHLNWLNKLLLPLKESTQLQGSESYKECLALLGRVHAAMKMVRIGLVVPQLQYRMYGSLINQMAQVAQNYDREFKQFKLFIIQNQILGSYLLQQNRAFAERELQMESFHAAVISQRREELDNTFAKMDRLSGQMEAESSAMEQAKKEMDEGLRQFQNRQVANALFAVLSAVAQIGLAFLTAGATAPGAVASAGQAVSIAGQAAQGLRRVVEILEQLEAVMEVVAAVKDLVDSLEQVGQIVDAPVMPELPSEADWSIFVNEVEAVAEGMPTEVSEVPVWTGRCKTVAALGREMSITAVQMSELQYDIWVQGMMRDMARSQADRLAAIQPADLTNYLEMATQMDMRTTRMLLGLLNILRIQNAALRYEYLLMPTELTTWPLGMDTVGDLLIAQENAALIGLMQLGPSSDFTSRHVVKDIPVNLLLDGEDWEFEIPVQAGMSSFPSSWSRVRIRHLEMHFVKEASGIGGEIIHQPTTQTGTVYILLQGSTIFHDRRRDQVLPFQAAAPLNYHYAYRLDTGDSTLTNEPSEQFANKFMQMTPFTRWRLRLSASAKENAGLAFPTATALDSTTQIVITFHVTAIRQIDWRHDEE

SEQ ID NO: 362 - protein, 867 aa, Artificial Sequence
  Synthetic
MALVDYGKLFEDLNQISMGVLDRVEFSEVMVIHRMYVRLADLNVGQLEGAEKVKRLYVFADVVELPVVEWRWPPQIPGSVTVIILCRLLQWPTDGRQSDTELHLTFMKLHAIQREENRWEITAADGMNWGVYIHAEEVQVGVLTMSWSSVLRVSALRSVITSGFRAVSVFEVPGSVRSTLGATLRPDHALYSTTMQATPNASHISAFNLRIVSPSAYRVCPLQNDTDTYLGIPADVAAVLPVDVVTDPNILLGMQTTVHIAELVKACHPSPDVVSAVGEHLNWLNKLLLPLKESTQLQGSESYKECLALLGRVHAAMKMVRIGLVVPQLQYRMYGSLINQMAQVAQNYDREFKQFKLFIIQNQILGSYLLQQNRAFAERELQMESFHAAVISQRREELDNTFAKMDRLSGQMEAESSAMEQAKKEMDEGLRQFQNRQVANALFAVLSAVAQIGLAFLTAGATAPGAVASAGQAVSIAGQAAQGLRRVVEILEQLEAVMEVVAAVKDLVDSLEQVGQIVDAPVMPELPSEADWSIFVNEVEAVAEGMPTEVSEVPVWTGRCNHVAALGQEMSITAVQMSELQYDIWVQGMMRDMARSQADRLAAIQPADLTNYLEMATQMDMRTTRMLLGLLNILRIQNAALRYEYLLMPTELTTWPLGMDTVGDLLIAQENAALIGLMQLGPSSDFTSRHVVKDIPVNLLLDGEDWEFEIPVQAGMSSFPSSWSRVRIRHLEMHFVKEASGIGGEIIHQPTTQTGTVYILLQGSTIFHDRRRDQVLPFQAAAPLNYHYAYRLDTGDSTLTNEPSEQFANKFMQMTPFTRWRLRLSASAKENAGLAFPTATALDSTTQIVITFHVTAIRQIDWRHDEE

SEQ ID NO: 363 - protein, 867 aa, Artificial Sequence
  Synthetic
MALVDYGKLFEDLNQISMGVLDRVEFSEVMVIHRMYVRLADLNVGQLEGAEKVKRLYVFADVVELPVVEWRWPPQIPGSVTVIILCRLLQWPTDGRQSDTELHLTFMKLHAIQREENRWEITAADGMNWGVYIHAEEVQVGVLTMSWSSVLRVSALRSVITSGFRAVSVFEVPGSVRSTLGATLRPDHALYSTTMQATPNASHISAFNLRIVSPSAYRVCPLQNDTDTYLGIPADVAAVLPVDVVTDPNILLGMQTTVHIAELVKACHPSPDVVSAVGEHLNWLNKLLLPLKESTQLQGSESYKECLALLGRVHAAMKMVRIGLVVPQLQYRMYGSLINQMAQVAQNYDREFKQFKLFIIQNQILGSYLLQQNRAFAERELQMESFHAAVISQRREELDNTFAKMDRLSGQMEAESSAMEQAKKEMDEGLRQFQNRQVANALFAVLSAVAQIGLAFLTAGATAPGAVASAGQAVSIAGQAAQGLRRVVEILEQLEAVMEVVAAVKDLVDSLEQVGQIVDAPVMPELPSEADWSIFVNEVEAVAEGMPTEVSEVPVWTVKCKNVAALGREMSITAVQMSELQYDIWVQGMMRDMARSQADRLAAIQPADLTNYLEMATQMDMRTTRMLLGLLNILRIQNAALRYEYLLMPTELTTWPLGMDTVGDLLIAQENAALIGLMQLGPSSDFTSRHVVKDIPVNLLLDGEDWEFEIPVQAGMSSFPSSWSRVRIRHLEMHFVKEASGIGGEIIHQPTTQTGTVYILLQGSTIFHDRRRDQVLPFQAAAPLNYHYAYRLDTGDSTLTNEPSEQFANKFMQMTPFTRWRLRLSASAKENAGLAFPTATALDSTTQIVITFHVTAIRQIDWRHDEE

SEQ ID NO: 364 - protein, 867 aa, Artificial Sequence
  Synthetic
MALVDYGKLFEDLNQISMGVLDRVEFSEVMVIHRMYVRLADLNVGQLEGAEKVKRLYVFADVVELPVVEWRWPPQIPGSVTVIILCRLLQWPTDGRQSDTELHLTFMKLHAIQREENRWEITAADGMNWGVYIHAEEVQVGVLTMSWSSVLRVSALRSVITSGFRAVSVFEVPGSVRSTLGATLRPDHALYSTTMQATPNASHISAFNLRIVSPSAYRVCPLQNDTDTYLGIPADVAAVLPVDVVTDPNILLGMQTTVHIAELVKACHPSPDVVSAVGEHLNWLNKLLLPLKESTQLQGSESYKECLALLGRVHAAMKMVRIGLVVPQLQYRMYGSLINQMAQVAQNYDREFKQFKLFIIQNQILGSYLLQQNRAFAERELQMESFHAAVISQRREELDNTFAKMDRLSGQMEAESSAMEQAKKEMDEGLRQFQNRQVANALFAVLSAVAQIGLAFLTAGATAPGAVASAGQAVSIAGQAAQGLRRVVEILEQLEAVMEVVAAVKDLVDSLEQVGQIVDAPVMPELPSEADWSIFVNEVEAVAEGMPTEVSEVPVWTVKCKSVAALGREMSITAVQMSELQYDIWVQGMMRDMARSQADRLAAIQPADLTNYLEMATQMDMRTTRMLLGLLNILRIQNAALRYEYLLMPTELTTWPLGMDTVGDLLIAQENAALIGLMQLGPSSDFTSRHVVKDIPVNLLLDGEDWEFEIPVQAGMSSFPSSWSRVRIRHLEMHFVKEASGIGGEIIHQPTTQTGTVYILLQGSTIFHDRRRDQVLPFQAAAPLNYHYAYRLDTGDSTLTNEPSEQFANKFMQMTPFTRWRLRLSASAKENAGLAFPTATALDSTTQIVITFHVTAIRQIDWRHDEE

SEQ ID NO: 365 - protein, 867 aa, Artificial Sequence
  Synthetic
MALVDYGKLFEDLNQISMGVLDRVEFSEVMVIHRMYVRLADLNVGQLEGAEKVKRLYVFADVVELPVVEWRWPPQIPGSVTVIILCRLLQWPTDGRQSDTELHLTFMKLHAIQREENRWEITAADGMNWGVYIHAEEVQVGVLTMSWSSVLRVSALRSVITSGFRAVSVFEVPGSVRSTLGATLRPDHALYSTTMQATPNASHISAFNLRIVSPSAYRVCPLQNDTDTYLGIPADVAAVLPVDVVTDPNILLGMQTTVHIAELVKACHPSPDVVSAVGEHLNWLNKLLLPLKESTQLQGSESYKECLALLGRVHAAMKMVRIGLVVPQLQYRMYGSLINQMAQVAQNYDREFKQFKLFIIQNQILGSYLLQQNRAFAERELQMESFHAAVISQRREELDNTFAKMDRLSGQMEAESSAMEQAKKEMDEGLRQFQNRQVANALFAVLSAVAQIGLAFLTAGATAPGAVASAGQAVSIAGQAAQGLRRVVEILEQLEAVMEVVAAVKDLVDSLEQVGQIVDAPVMPELPSEADWSIFVNEVEAVAEGMPTEVSEVPVWTVRCKNVAALGREMSITAVQMSELQYDIWVQGMMRDMARSQADRLAAIQPADLTNYLEMATQMDMRTTRMLLGLLNILRIQNAALRYEYLLMPTELTTWPLGMDTVGDLLIAQENAALIGLMQLGPSSDFTSRHVVKDIPVNLLLDGEDWEFEIPVQAGMSSFPSSWSRVRIRHLEMHFVKEASGIGGEIIHQPTTQTGTVYILLQGSTIFHDRRRDQVLPFQAAAPLNYHYAYRLDTGDSTLTNEPSEQFANKFMQMTPFTRWRLRLSASAKENAGLAFPTATALDSTTQIVITFHVTAIRQIDWRHDEE

SEQ ID NO: 366 - protein, 867 aa, Artificial Sequence
  Synthetic
MALVDYGKLFEDLNQISMGVLDRVEFSEVMVIHRMYVRLADLNVGQLEGAEKVKRLYVFADVVELPVVEWRWPPQIPGSVTVIILCRLLQWPTDGRQSDTELHLTFMKLHAIQREENRWEITAADGMNWGVYIHAEEVQVGVLTMSWSSVLRVSALRSVITSGFRAVSVFEVPGSVRSTLGATLRPDHALYSTTMQATPNASHISAFNLRIVSPSAYRVCPLQNDTDTYLGIPADVAAVLPVDVVTDPNILLGMQTTVHIAELVKACHPSPDVVSAVGEHLNWLNKLLLPLKESTQLQGSESYKECLALLGRVHAAMKMVRIGLVVPQLQYRMYGSLINQMAQVAQNYDREFKQFKLFIIQNQILGSYLLQQNRAFAERELQMESFHAAVISQRREELDNTFAKMDRLSGQMEAESSAMEQAKKEMDEGLRQFQNRQVANALFAVLSAVAQIGLAFLTAGATAPGAVASAGQAVSIAGQAAQGLRRVVEILEQLEAVMEVVAAVKDLVDSLEQVGQIVDAPVMPELPSEADWSIFVNEVEAVAEGMPTEVSEVPVWRARCKHVAALGREMSITAVQMSELQYDIWVQGMMRDMARSQADRLAAIQPADLTNYLEMATQMDMRTTRMLLGLLNILRIQNAALRYEYLLMPTELTTWPLGMDTVGDLLIAQENAALIGLMQLGPSSDFTSRHVVKDIPVNLLLDGEDWEFEIPVQAGMSSFPSSWSRVRIRHLEMHFVKEASGIGGEIIHQPTTQTGTVYILLQGSTIFHDRRRDQVLPFQAAAPLNYHYAYRLDTGDSTLTNEPSEQFANKFMQMTPFTRWRLRLSASAKENAGLAFPTATALDSTTQIVITFHVTAIRQIDWRHDEE

SEQ ID NO: 367 - protein, 867 aa, Artificial Sequence
  Synthetic
MALVDYGKLFEDLNQISMGVLDRVEFSEVMVIHRMYVRLADLNVGQLEGAEKVKRLYVFADVVELPVVEWRWPPQIPGSVTVIILCRLLQWPTDGRQSDTELHLTFMKLHAIQREENRWEITAADGMNWGVYIHAEEVQVGVLTMSWSSVLRVSALRSVITSGFRAVSVFEVPGSVRSTLGATLRPDHALYSTTMQATPNASHISAFNLRIVSPSAYRVCPLQNDTDTYLGIPADVAAVLPVDVVTDPNILLGMQTTVHIAELVKACHPSPDVVSAVGEHLNWLNKLLLPLKESTQLQGSESYKECLALLGRVHAAMKMVRIGLVVPQLQYRMYGSLINQMAQVAQNYDREFKQFKLFIIQNQILGSYLLQQNRAFAERELQMESFHAAVISQRREELDNTFAKMDRLSGQMEAESSAMEQAKKEMDEGLRQFQNRQVANALFAVLSAVAQIGLAFLTAGATAPGAVASAGQAVSIAGQAAQGLRRVVEILEQLEAVMEVVAAVKDLVDSLEQVGQIVDAPVMPELPSEADWSIFVNEVEAVAEGMPTEVSEVPVWIGRCKSVAALGREMSITAVQMSELQYDIWVQGMMRDMARSQADRLAAIQPADLTNYLEMATQMDMRTTRMLLGLLNILRIQNAALRYEYLLMPTELTTWPLGMDTVGDLLIAQENAALIGLMQLGPSSDFTSRHVVKDIPVNLLLDGEDWEFEIPVQAGMSSFPSSWSRVRIRHLEMHFVKEASGIGGEIIHQPTTQTGTVYILLQGSTIFHDRRRDQVLPFQAAAPLNYHYAYRLDTGDSTLTNEPSEQFANKFMQMTPFTRWRLRLSASAKENAGLAFPTATALDSTTQIVITFHVTAIRQIDWRHDEE

SEQ ID NO: 368 - DNA, 2601 bp, Artificial Sequence
  Synthetic
atggctctcgtggattacggcaagcttttcgaggatctgaaccagataagcatgggtgtactggatcgggtagagttttcagaggtgatggtgatccacaggatgtatgtgaggctagctgatctgaatgtggggcagctcgagggagccgagaaagtgaagcacttgtatatttttaccgacgttctcgagctaccagtcgtggaatggcggtggccgccgcaaataccaggatcggtgacggtgatcatattgtgtcgtcttcttcaatggccaactgatgggaggcagtcggacaccgagctccacctgacattcatgaagttgcatgccatacaacgagaggaaaatcggtgggagataaccgcagcagatggcatgaactggggagtttacatacacgcagaggaagtacaggttggcgtgctgacaatgtcatggtcttcggtacttagagtttcggcacttcgctctgttataacctccggctttcgcgccgttagtgtgtttgaggtaccgggaagtgtaaggtccacccttggagctactttaaggcccgatcacgccttatatagtacaactatgcaagccacacccaacgcatcgcatattagtgcttttaaccttcgcatagtttccccgtcggcatatcgtgtttgtcctctccaaaatgacacagatacctacttaggtattccagcagacgtggcggcagttcttccagtagacgtggtgactgatcctaacatcttgctgggcatgcagacaacggtacacattgcggagctagtcaaggcatgtcatccgtcacccgatgttgtgagcgctgtaggggagcacctgaactggctcaacaaactcttactcccacttaaggaatcgactcagttgcaaggaagcgagtcgtacaaggagtgccttgcactcttgggtcgtgttcacgctgcgatgaagatggtgagaattggcttagtagtgccccagctgcaatacagaatgtacggtagcctcatcaaccaaatggcccaagtagcacaaaactacgaccgagaattcaagcaattcaaattattcatcatccaaaatcaaatccttggcagctatttgctgcagcagaacagggcatttgctgagagggagctgcagatggagagctttcatgctgctgtcatttctcaaagaagggaggagttggacaatacattcgcaaagatggaccgattgagcgggcaaatggaggcagagagtagtgcaatggagcaagccaaaaaggaaatggacgaaggattgaggcagttccagaataggcaagttgcgaacgccctctttgccgttcttagcgctgtagctcagattgggcttgcattccttacggctggtgcaacggctcctggagctgtggcgtcggcggggcaagctgtgagcatagcaggtcaggcggcgcaaggtctgcgaagggtggtggaaattctagagcagctggaggctgtgatggaggttgtggctgctgtgaaggacctcgtggattcattggaacaggtaggtcagattgtggacgcaccggtgatgccggaattgccctcagaggcggactggttcatttttgtgaacgaggtggaggccgtggcagagggcatgccaacggaagtctcggaggttccggtgtggcacggcaagtgcaagaatgtggctgcactgggtcgggagatgagcatcacggcagtacagatgtcggagctgcagtatgacatctgggtgcaaggcatgatgcgggatatggctcgaagccaggcagacaggctggccgcaattcaacccgcggaccttaccaactatttggagatggctacccagatggatatgcggactacgaggatgctgctggggctcctcaacatattgcgcatccagaatgcggcgctcaggtacgagtatcttctaatgcccacggagctcacaacatggccactgggtatggataccgtgggtgacttgctcatcgcgcaggagaatgctgcactgataggattaatgcagctagggccctcatctgatttcacgagcaggcatgtggtgaaagacatacctgtgaacttgctgctcgatggcgaggattgggagtttgagattcctgtgcaagctggcatgtccagcttcccttccagctggtctcgcgtccgtattcggcacctggagatgcactttgtgaaggaggccagcggtattggtggtgagattatccaccagcctaccacccagactgggaccgtttacatccttctgcagggttccactatcttccatgaccgcagaagagaccaggtgttgccttttcaggccgctgctccgctcaactaccattacgcgtaccgcctcgacaccggcgactccactctcacaaacgaaccctctgaacagtttgccaacaagttcatgcagatgacacccttcacccgttggaggcttcgtctgtctgcgtccgcaaaagagaatgcaggattagcctttcccacggctacagcacttgactccactacccagattgtcatcactttccatgttacggccatcagacaaattgactggcggcacgacgaagag

SEQ ID NO: 369 - DNA, 2601 bp, Artificial Sequence
  Synthetic
atggctctcgtggattacggcaagcttttcgaggatctgaaccagataagcatgggtgtactggatcgggtagagttttcagaggtgatggtgatccacaggatgtatgtgaggctagctgatctgaatgtggggcagctcgagggagccgagaaagtgaagcacttgtatatttttaccgacgttctcgagctaccagtcgtggaatggcggtggccgccgcaaataccaggatcggtgacggtgatcatattgtgtcgtcttcttcaatggccaactgatgggaggcagtcggacaccgagctccacctgacattcatgaagttgcatgccatacaacgagaggaaaatcggtgggagataaccgcagcagatggcatgaactggggagtttacatacacgcagaggaagtacaggttggcgtgctgacaatgtcatggtcttcggtacttagagtttcggcacttcgctctgttataacctccggctttcgcgccgttagtgtgtttgaggtaccgggaagtgtaaggtccacccttggagctactttaaggcccgatcacgccttatatagtacaactatgcaagccacacccaacgcatcgcatattagtgcttttaaccttcgcatagtttccccgtcggcatatcgtgtttgtcctctccaaaatgacacagatacctacttaggtattccagcagacgtggcggcagttcttccagtagacgtggtgactgatcctaacatcttgctgggcatgcagacaacggtacacattgcggagctagtcaaggcatgtcatccgtcacccgatgttgtgagcgctgtaggggagcacctgaactggctcaacaaactcttactcccacttaaggaatcgactcagttgcaaggaagcgagtcgtacaaggagtgccttgcactcttgggtcgtgttcacgctgcgatgaagatggtgagaattggcttagtagtgccccagctgcaatacagaatgtacggtagcctcatcaaccaaatggcccaagtagcacaaaactacgaccgagaattcaagcaattcaaattattcatcatccaaaatcaaatccttggcagctatttgctgcagcagaacagggcatttgctgagagggagctgcagatggagagctttcatgctgctgtcatttctcaaagaagggaggagttggacaatacattcgcaaagatggaccgattgagcgggcaaatggaggcagagagtagtgcaatggagcaagccaaaaaggaaatggacgaaggattgaggcagttccagaataggcaagttgcgaacgccctctttgccgttcttagcgctgtagctcagattgggcttgcattccttacggctggtgcaacggctcctggagctgtggcgtcggcggggcaagctgtgagcatagcaggtcaggcggcgcaaggtctgcgaagggtggtggaaattctagagcagctggaggctgtgatggaggttgtggctgctgtgaaggacctcgtggattcattggaacaggtaggtcagattgtggacgcaccggtgatgccggaattgccctcagaggcggactggtccatttttgtgaacgaggtggaggccgtggcagagggcatgccaacggaagtctcggaggttccggtgtggctggccaggtgcaagaatgtggctgcactgggtcgggagatgagcatcacggcagtacagatgtcggagctgcagtatgacatctgggtgcaaggcatgatgcgggatatggctcgaagccaggcagacaggctggccgcaattcaacccgcggaccttaccaactatttggagatggctacccagatggatatgcggactacgaggatgctgctggggctcctcaacatattgcgcatccagaatgcggcgctcaggtacgagtatcttctaatgcccacggagctcacaacatggccactgggtatggataccgtgggtgacttgctcatcgcgcaggagaatgctgcactgataggattaatgcagctagggccctcatctgatttcacgagcaggcatgtggtgaaagacatacctgtgaacttgctgctcgatggcgaggattgggagtttgagattcctgtgcaagctggcatgtccagcttcccttccagctggtctcgcgtccgtattcggcacctggagatgcactttgtgaaggaggccagcggtattggtggtgagattatccaccagcctaccacccagactgggaccgtttacatccttctgcagggttccactatcttccatgaccgcagaagagaccaggtgttgccttttcaggccgctgctccgctcaactaccattacgcgtaccgcctcgacaccggcgactccactctcacaaacgaaccctctgaacagtttgccaacaagttcatgcagatgacacccttcacccgttggaggcttcgtctgtctgcgtccgcaaaagagaatgcaggattagcctttcccacggctacagcacttgactccactacccagattgtcatcactttccatgttacggccatcagacaaattgactggcggcacgacgaagag

SEQ ID NO: 370 - DNA, 2601 bp, Artificial Sequence
  Synthetic
atggctctcgtggattacggcaagcttttcgaggatctgaaccagataagcatgggtgtactggatcgggtagagttttcagaggtgatggtgatccacaggatgtatgtgaggctagctgatctgaatgtggggcagctcgagggagccgagaaagtgaagcacttgtatatttttaccgacgttctcgagctaccagtcgtggaatggcggtggccgccgcaaataccaggatcggtgacggtgatcatattgtgtcgtcttcttcaatggccaactgatgggaggcagtcggacaccgagctccacctgacattcatgaagttgcatgccatacaacgagaggaaaatcggtgggagataaccgcagcagatggcatgaactggggagtttacatacacgcagaggaagtacaggttggcgtgctgacaatgtcatggtcttcggtacttagagtttcggcacttcgctctgttataacctccggctttcgcgccgttagtgtgtttgaggtaccgggaagtgtaaggtccacccttggagctactttaaggcccgatcacgccttatatagtacaactatgcaagccacacccaacgcatcgcatattagtgcttttaaccttcgcatagtttccccgtcggcatatcgtgtttgtcctctccaaaatgacacagatacctacttaggtattccagcagacgtggcggcagttcttccagtagacgtggtgactgatcctaacatcttgctgggcatgcagacaacggtacacattgcggagctagtcaaggcatgtcatccgtcacccgatgttgtgagcgctgtaggggagcacctgaactggctcaacaaactcttactcccacttaaggaatcgactcagttgcaaggaagcgagtcgtacaaggagtgccttgcactcttgggtcgtgttcacgctgcgatgaagatggtgagaattggcttagtagtgccccagctgcaatacagaatgtacggtagcctcatcaaccaaatggcccaagtagcacaaaactacgaccgagaattcaagcaattcaaattattcatcatccaaaatcaaatccttggcagctatttgctgcagcagaacagggcatttgctgagagggagctgcagatggagagctttcatgctgctgtcatttctcaaagaagggaggagttggacaatacattcgcaaagatggaccgattgagcgggcaaatggaggcagagagtagtgcaatggagcaagccaaaaaggaaatggacgaaggattgaggcagttccagaataggcaagttgcgaacgccctctttgccgttcttagcgctgtagctcagattgggcttgcattccttacggctggtgcaacggctcctggagctgtggcgtcggcggggcaagctgtgagcatagcaggtcaggcggcgcaaggtctgcgaagggtggtggaaattctagagcagctggaggctgtgatggaggttgtggctgctgtgaaggacctcgtggattcattggaacaggtaggtcagattgtggacgcaccggtgatgccggaattgccctcagaggcggactggtccatttttgtgaacgaggtggaggccgtggcagagggcatgccaacggaagtctcggaggttccggtgtggcaggccaggtgcaagcatgtggctgcactgggtcgggagatgagcatcacggcagtacagatgtcggagctgcagtatgacatctgggtgcaaggcatgatgcgggatatggctcgaagccaggcagacaggctggccgcaattcaacccgcggaccttaccaactatttggagatggctacccagatggatatgcggactacgaggatgctgctggggctcctcaacatattgcgcatccagaatgcggcgctcaggtacgagtatcttctaatgcccacggagctcacaacatggccactgggtatggataccgtgggtgacttgctcatcgcgcaggagaatgctgcactgataggattaatgcagctagggccctcatctgatttcacgagcaggcatgtggtgaaagacatacctgtgaacttgctgctcgatggcgaggattgggagtttgagattcctgtgcaagctggcatgtccagcttcccttccagctggtctcgcgtccgtattcggcacctggagatgcactttgtgaaggaggccagcggtattggtggtgagattatccaccagcctaccacccagactgggaccgtttacatccttctgcagggttccactatcttccatgaccgcagaagagaccaggtgttgccttttcaggccgctgctccgctcaactaccattacgcgtaccgcctcgacaccggcgactccactctcacaaacgaaccctctgaacagtttgccaacaagttcatgcagatgacacccttcacccgttggaggcttcgtctgtctgcgtccgcaaaagagaatgcaggattagcctttcccacggctacagcacttgactccactacccagattgtcatcactttccatgttacggccatcagacaaattgactggcggcacgacgaagag

SEQ ID NO: 371 - DNA, 2601 bp, Artificial Sequence
  Synthetic
atggctctcgtggattacggcaagcttttcgaggatctgaaccagataagcatgggtgtactggatcgggtagagttttcagaggtgatggtgatccacaggatgtatgtgaggctagctgatctgaatgtggggcagctcgagggagccgagaaagtgaagcacttgtatgtttttgccgacgttatcgagctaccagtcgtggaatggcggtggccgccgcaaataccaggatcggtgacggtgatcatattgtgtcgtcttcttcaatggccaactgatgggaggcagtcggacaccgagctccacctgacattcatgaagttgcatgccatacaacgagaggaaaatcggtgggagataaccgcagcagatggcatgaactggggagtttacatacacgcagaggaagtacaggttggcgtgctgacaatgtcatggtcttcggtacttagagtttcggcacttcgctctgttataacctccggctttcgcgccgttagtgtgtttgaggtaccgggaagtgtaaggtccacccttggagctactttaaggcccgatcacgccttatatagtacaactatgcaagccacacccaacgcatcgcatattagtgcttttaaccttcgcatagtttccccgtcggcatatcgtgtttgtcctctccaaaatgacacagatacctacttaggtattccagcagacgtggcggcagttcttccagtagacgtggtgactgatcctaacatcttgctgggcatgcagacaacggtacacattgcggagctagtcaaggcatgtcatccgtcacccgatgttgtgagcgctgtaggggagcacctgaactggctcaacaaactcttactcccacttaaggaatcgactcagttgcaaggaagcgagtcgtacaaggagtgccttgcactcttgggtcgtgttcacgctgcgatgaagatggtgagaattggcttagtagtgccccagctgcaatacagaatgtacggtagcctcatcaaccaaatggcccaagtagcacaaaactacgaccgagaattcaagcaattcaaattattcatcatccaaaatcaaatccttggcagctatttgctgcagcagaacagggcatttgctgagagggagctgcagatggagagctttcatgctgctgtcatttctcaaagaagggaggagttggacaatacattcgcaaagatggaccgattgagcgggcaaatggaggcagagagtagtgcaatggagcaagccaaaaaggaaatggacgaaggattgaggcagttccagaataggcaagttgcgaacgccctctttgccgttcttagcgctgtagctcagattgggcttgcattccttacggctggtgcaacggctcctggagctgtggcgtcggcggggcaagctgtgagcatagcaggtcaggcggcgcaaggtctgcgaagggtggtggaaattctagagcagctggaggctgtgatggaggttgtggctgctgtgaaggacctcgtggattcattggaacaggtaggtcagattgtggacgcaccggtgatgccggaattgccctcagaggcggactggtccatttttgtgaacgaggtggaggccgtggcagagggcatgccaacggaagtctcggaggttccggtgtggcaggccaggtgcaagcatgtggctgcactgggtcgggagatgagcatcacggcagtacagatgtcggagctgcagtatgacatctgggtgcaaggcatgatgcgggatatggctcgaagccaggcagacaggctggccgcaattcaacccgcggaccttaccaactatttggagatggctacccagatggatatgcggactacgaggatgctgctggggctcctcaacatattgcgcatccagaatgcggcgctcaggtacgagtatcttctaatgcccacggagctcacaacatggccactgggtatggataccgtgggtgacttgctcatcgcgcaggagaatgctgcactgataggattaatgcagctagggccctcatctgatttcacgagcaggcatgtggtgaaagacatacctgtgaacttgctgctcgatggcgaggattgggagtttgagattcctgtgcaagctggcatgtccagcttcccttccagctggtctcgcgtccgtattcggcacctggagatgcactttgtgaaggaggccagcggtattggtggtgagattatccaccagcctaccacccagactgggaccgtttacatccttctgcagggttccactatcttccatgaccgcagaagagaccaggtgttgccttttcaggccgctgctccgctcaactaccattacgcgtaccgcctcgacaccggcgactccactctcacaaacgaaccctctgaacagtttgccaacaagttcatgcagatgacacccttcacccgttggaggcttcgtctgtctgcgtccgcaaaagagaatgcaggattagcctttcccacggctacagcacttgactccactacccagattgtcatcactttccatgttacggccatcagacaaattgactggcggcacgacgaagag

SEQ ID NO: 372 - DNA, 2601 bp, Artificial Sequence
  Synthetic
atggctctcgtggattacggcaagcttttcgaggatctgaaccagataagcatgggtgtactggatcgggtagagttttcagaggtgatggtgatccacaggatgtatgtgaggctagctgatctgaatgtggggcagctcgagggagccgagaaagtgaagcacttgtatgtttttgccgacgttatcgagctaccagtcgtggaatggcggtggccgccgcaaataccaggatcggtgacggtgatcatattgtgtcgtcttcttcaatggccaactgatgggaggcagtcggacaccgagctccacctgacattcatgaagttgcatgccatacaacgagaggaaaatcggtgggagataaccgcagcagatggcatgaactggggagtttacatacacgcagaggaagtacaggttggcgtgctgacaatgtcatggtcttcggtacttagagtttcggcacttcgctctgttataacctccggctttcgcgccgttagtgtgtttgaggtaccgggaagtgtaaggtccacccttggagctactttaaggcccgatcacgccttatatagtacaactatgcaagccacacccaacgcatcgcatattagtgcttttaaccttcgcatagtttccccgtcggcatatcgtgtttgtcctctccaaaatgacacagatacctacttaggtattccagcagacgtggcggcagttcttccagtagacgtggtgactgatcctaacatcttgctgggcatgcagacaacggtacacattgcggagctagtcaaggcatgtcatccgtcacccgatgttgtgagcgctgtaggggagcacctgaactggctcaacaaactcttactcccacttaaggaatcgactcagttgcaaggaagcgagtcgtacaaggagtgccttgcactcttgggtcgtgttcacgctgcgatgaagatggtgagaattggcttagtagtgccccagctgcaatacagaatgtacggtagcctcatcaaccaaatggcccaagtagcacaaaactacgaccgagaattcaagcaattcaaattattcatcatccaaaatcaaatccttggcagctatttgctgcagcagaacagggcatttgctgagagggagctgcagatggagagctttcatgctgctgtcatttctcaaagaagggaggagttggacaatacattcgcaaagatggaccgattgagcgggcaaatggaggcagagagtagtgcaatggagcaagccaaaaaggaaatggacgaaggattgaggcagttccagaataggcaagttgcgaacgccctctttgccgttcttagcgctgtagctcagattgggcttgcattccttacggctggtgcaacggctcctggagctgtggcgtcggcggggcaagctgtgagcatagcaggtcaggcggcgcaaggtctgcgaagggtggtggaaattctagagcagctggaggctgtgatggaggttgtggctgctgtgaaggacctcgtggattcattggaacaggtaggtcagattgtggacgcaccggtgatgccggaattgccctcagaggcggactggtccatttttgtgaacgaggtggaggccgtggcagagggcatgccaacggaagtctcggaggttccggtgtggagggccaggtgcaagaatgtggctgcactgggtcgggagatgagcatcacggcagtacagatgtcggagctgcagtatgacatctgggtgcaaggcatgatgcgggatatggctcgaagccaggcagacaggctggccgcaattcaacccgcggaccttaccaactatttggagatggctacccagatggatatgcggactacgaggatgctgctggggctcctcaacatattgcgcatccagaatgcggcgctcaggtacgagtatcttctaatgcccacggagctcacaacatggccactgggtatggataccgtgggtgacttgctcatcgcgcaggagaatgctgcactgataggattaatgcagctagggccctcatctgatttcacgagcaggcatgtggtgaaagacatacctgtgaacttgctgctcgatggcgaggattgggagtttgagattcctgtgcaagctggcatgtccagcttcccttccagctggtctcgcgtccgtattcggcacctggagatgcactttgtgaaggaggccagcggtattggtggtgagattatccaccagcctaccacccagactgggaccgtttacatccttctgcagggttccactatcttccatgaccgcagaagagaccaggtgttgccttttcaggccgctgctccgctcaactaccattacgcgtaccgcctcgacaccggcgactccactctcacaaacgaaccctctgaacagtttgccaacaagttcatgcagatgacacccttcacccgttggaggcttcgtctgtctgcgtccgcaaaagagaatgcaggattagcctttcccacggctacagcacttgactccactacccagattgtcatcactttccatgttacggccatcagacaaattgactggcggcacgacgaagag

SEQ ID NO: 373 - DNA, 2601 bp, Artificial Sequence
  Synthetic
atggctctcgtggattacggcaagcttttcgaggatctgaaccagataagcatgggtgtactggatcgggtagagttttcagaggtgatggtgatccacaggatgtatgtgaggctagctgatctgaatgtggggcagctcgagggagccgagaaagtgaagcagttgtatattttttgcgacgttctcgagctaccagtcgtggaatggcggtggccgccgcaaataccaggatcggtgacggtgatcatattgtgtcgtcttcttcaatggccaactgatgggaggcagtcggacaccgagctccacctgacattcatgaagttgcatgccatacaacgagaggaaaatcggtgggagataaccgcagcagatggcatgaactggggagtttacatacacgcagaggaagtacaggttggcgtgctgacaatgtcatggtcttcggtacttagagtttcggcacttcgctctgttataacctccggctttcgcgccgttagtgtgtttgaggtaccgggaagtgtaaggtccacccttggagctactttaaggcccgatcacgccttatatagtacaactatgcaagccacacccaacgcatcgcatattagtgcttttaaccttcgcatagtttccccgtcggcatatcgtgtttgtcctctccaaaatgacacagatacctacttaggtattccagcagacgtggcggcagttcttccagtagacgtggtgactgatcctaacatcttgctgggcatgcagacaacggtacacattgcggagctagtcaaggcatgtcatccgtcacccgatgttgtgagcgctgtaggggagcacctgaactggctcaacaaactcttactcccacttaaggaatcgactcagttgcaaggaagcgagtcgtacaaggagtgccttgcactcttgggtcgtgttcacgctgcgatgaagatggtgagaattggcttagtagtgccccagctgcaatacagaatgtacggtagcctcatcaaccaaatggcccaagtagcacaaaactacgaccgagaattcaagcaattcaaattattcatcatccaaaatcaaatccttggcagctatttgctgcagcagaacagggcatttgctgagagggagctgcagatggagagctttcatgctgctgtcatttctcaaagaagggaggagttggacaatacattcgcaaagatggaccgattgagcgggcaaatggaggcagagagtagtgcaatggagcaagccaaaaaggaaatggacgaaggattgaggcagttccagaataggcaagttgcgaacgccctctttgccgttcttagcgctgtagctcagattgggcttgcattccttacggctggtgcaacggctcctggagctgtggcgtcggcggggcaagctgtgagcatagcaggtcaggcggcgcaaggtctgcgaagggtggtggaaattctagagcagctggaggctgtgatggaggttgtggctgctgtgaaggacctcgtggattcattggaacaggtaggtcagattgtggacgcaccggtgatgccggaattgccctcagaggcggactggtccatttttgtgaacgaggtggaggccgtggcagagggcatgccaacggaagtctcggaggttccggtgtggcaggccaggtgcaagaatgtggctgcactgggtcgggagatgagcatcacggcagtacagatgtcggagctgcagtatgacatctgggtgcaaggcatgatgcgggatatggctcgaagccaggcagacaggctggccgcaattcaacccgcggaccttaccaactatttggagatggctacccagatggatatgcggactacgaggatgctgctggggctcctcaacatattgcgcatccagaatgcggcgctcaggtacgagtatcttctaatgcccacggagctcacaacatggccactgggtatggataccgtgggtgacttgctcatcgcgcaggagaatgctgcactgataggattaatgcagctagggccctcatctgatttcacgagcaggcatgtggtgaaagacatacctgtgaacttgctgctcgatggcgaggattgggagtttgagattcctgtgcaagctggcatgtccagcttcccttccagctggtctcgcgtccgtattcggcacctggagatgcactttgtgaaggaggccagcggtattggtggtgagattatccaccagcctaccacccagactgggaccgtttacatccttctgcagggttccactatcttccatgaccgcagaagagaccaggtgttgccttttcaggccgctgctccgctcaactaccattacgcgtaccgcctcgacaccggcgactccactctcacaaacgaaccctctgaacagtttgccaacaagttcatgcagatgacacccttcacccgttggaggcttcgtctgtctgcgtccgcaaaagagaatgcaggattagcctttcccacggctacagcacttgactccactacccagattgtcatcactttccatgttacggccatcagacaaattgactggcggcacgacgaagag

SEQ ID NO: 374 - DNA, 2601 bp, Artificial Sequence
  Synthetic
atggctctcgtggattacggcaagcttttcgaggatctgaaccagataagcatgggtgtactggatcgggtagagttttcagaggtgatggtgatccacaggatgtatgtgaggctagctgatctgaatgtggggcagctcgagggagccgagaaagtgaagcgcttctatatctttgccgacatcgtcgagctcccagtcgtggaatggcggtggccgccgcaaataccaggatcggtgacggtgatcatattgtgtcgtcttcttcaatggccaactgatgggaggcagtcggacaccgagctccacctgacattcatgaagttgcatgccatacaacgagaggaaaatcggtgggagataaccgcagcagatggcatgaactggggagtttacatacacgcagaggaagtacaggttggcgtgctgacaatgtcatggtcttcggtacttagagtttcggcacttcgctctgttataacctccggctttcgcgccgttagtgtgtttgaggtaccgggaagtgtaaggtccacccttggagctactttaaggcccgatcacgccttatatagtacaactatgcaagccacacccaacgcatcgcatattagtgcttttaaccttcgcatagtttccccgtcggcatatcgtgtttgtcctctccaaaatgacacagatacctacttaggtattccagcagacgtggcggcagttcttccagtagacgtggtgactgatcctaacatcttgctgggcatgcagacaacggtacacattgcggagctagtcaaggcatgtcatccgtcacccgatgttgtgagcgctgtaggggagcacctgaactggctcaacaaactcttactcccacttaaggaatcgactcagttgcaaggaagcgagtcgtacaaggagtgccttgcactcttgggtcgtgttcacgctgcgatgaagatggtgagaattggcttagtagtgccccagctgcaatacagaatgtacggtagcctcatcaaccaaatggcccaagtagcacaaaactacgaccgagaattcaagcaattcaaattattcatcatccaaaatcaaatccttggcagctatttgctgcagcagaacagggcatttgctgagagggagctgcagatggagagctttcatgctgctgtcatttctcaaagaagggaggagttggacaatacattcgcaaagatggaccgattgagcgggcaaatggaggcagagagtagtgcaatggagcaagccaaaaaggaaatggacgaaggattgaggcagttccagaataggcaagttgcgaacgccctctttgccgttcttagcgctgtagctcagattgggcttgcattccttacggctggtgcaacggctcctggagctgtggcgtcggcggggcaagctgtgagcatagcaggtcaggcggcgcaaggtctgcgaagggtggtggaaattctagagcagctggaggctgtgatggaggttgtggctgctgtgaaggacctcgtggattcattggaacaggtaggtcagattgtggacgcaccggtgatgccggaattgccctcagaggcggactggtccatttttgtgaacgaggtggaggccgtggcagagggcatgccaacggaagtctcggaggttccggtgtggatcggcaagtgcaagaatgtggctgcactgggtcgggagatgagcatcacggcagtacagatgtcggagctgcagtatgacatctgggtgcaaggcatgatgcgggatatggctcgaagccaggcagacaggctggccgcaattcaacccgcggaccttaccaactatttggagatggctacccagatggatatgcggactacgaggatgctgctggggctcctcaacatattgcgcatccagaatgcggcgctcaggtacgagtatcttctaatgcccacggagctcacaacatggccactgggtatggataccgtgggtgacttgctcatcgcgcaggagaatgctgcactgataggattaatgcagctagggccctcatctgatttcacgagcaggcatgtggtgaaagacatacctgtgaacttgctgctcgatggcgaggattgggagtttgagattcctgtgcaagctggcatgtccagcttcccttccagctggtctcgcgtccgtattcggcacctggagatgcactttgtgaaggaggccagcggtattggtggtgagattatccaccagcctaccacccagactgggaccgtttacatccttctgcagggttccactatcttccatgaccgcagaagagaccaggtgttgccttttcaggccgctgctccgctcaactaccattacgcgtaccgcctcgacaccggcgactccactctcacaaacgaaccctctgaacagtttgccaacaagttcatgcagatgacacccttcacccgttggaggcttcgtctgtctgcgtccgcaaaagagaatgcaggattagcctttcccacggctacagcacttgactccactacccagattgtcatcactttccatgttacggccatcagacaaattgactggcggcacgacgaagag

SEQ ID NO: 375 - DNA, 2601 bp, Artificial Sequence
  Synthetic
atggctctcgtggattacggcaagcttttcgaggatctgaaccagataagcatgggtgtactggatcgggtagagttttcagaggtgatggtgatccacaggatgtatgtgaggctagctgatctgaatgtggggcagctcgagggagccgagaaagtgaagcgcttctatatctttgccgacatcgtcgagctcccagtcgtggaatggcggtggccgccgcaaataccaggatcggtgacggtgatcatattgtgtcgtcttcttcaatggccaactgatgggaggcagtcggacaccgagctccacctgacattcatgaagttgcatgccatacaacgagaggaaaatcggtgggagataaccgcagcagatggcatgaactggggagtttacatacacgcagaggaagtacaggttggcgtgctgacaatgtcatggtcttcggtacttagagtttcggcacttcgctctgttataacctccggctttcgcgccgttagtgtgtttgaggtaccgggaagtgtaaggtccacccttggagctactttaaggcccgatcacgccttatatagtacaactatgcaagccacacccaacgcatcgcatattagtgcttttaaccttcgcatagtttccccgtcggcatatcgtgtttgtcctctccaaaatgacacagatacctacttaggtattccagcagacgtggcggcagttcttccagtagacgtggtgactgatcctaacatcttgctgggcatgcagacaacggtacacattgcggagctagtcaaggcatgtcatccgtcacccgatgttgtgagcgctgtaggggagcacctgaactggctcaacaaactcttactcccacttaaggaatcgactcagttgcaaggaagcgagtcgtacaaggagtgccttgcactcttgggtcgtgttcacgctgcgatgaagatggtgagaattggcttagtagtgccccagctgcaatacagaatgtacggtagcctcatcaaccaaatggcccaagtagcacaaaactacgaccgagaattcaagcaattcaaattattcatcatccaaaatcaaatccttggcagctatttgctgcagcagaacagggcatttgctgagagggagctgcagatggagagctttcatgctgctgtcatttctcaaagaagggaggagttggacaatacattcgcaaagatggaccgattgagcgggcaaatggaggcagagagtagtgcaatggagcaagccaaaaaggaaatggacgaaggattgaggcagttccagaataggcaagttgcgaacgccctctttgccgttcttagcgctgtagctcagattgggcttgcattccttacggctggtgcaacggctcctggagctgtggcgtcggcggggcaagctgtgagcatagcaggtcaggcggcgcaaggtctgcgaagggtggtggaaattctagagcagctggaggctgtgatggaggttgtggctgctgtgaaggacctcgtggattcattggaacaggtaggtcagattgtggacgcaccggtgatgccggaattgccctcagaggcggactggtccatttttgtgaacgaggtggaggccgtggcagagggcatgccaacggaagtctcggaggttccggtgtggacggtcaagtgcaagaatgtggctgcactgggtcgggagatgagcatcacggcagtacagatgtcggagctgcagtatgacatctgggtgcaaggcatgatgcgggatatggctcgaagccaggcagacaggctggccgcaattcaacccgcggaccttaccaactatttggagatggctacccagatggatatgcggactacgaggatgctgctggggctcctcaacatattgcgcatccagaatgcggcgctcaggtacgagtatcttctaatgcccacggagctcacaacatggccactgggtatggataccgtgggtgacttgctcatcgcgcaggagaatgctgcactgataggattaatgcagctagggccctcatctgatttcacgagcaggcatgtggtgaaagacatacctgtgaacttgctgctcgatggcgaggattgggagtttgagattcctgtgcaagctggcatgtccagcttcccttccagctggtctcgcgtccgtattcggcacctggagatgcactttgtgaaggaggccagcggtattggtggtgagattatccaccagcctaccacccagactgggaccgtttacatccttctgcagggttccactatcttccatgaccgcagaagagaccaggtgttgccttttcaggccgctgctccgctcaactaccattacgcgtaccgcctcgacaccggcgactccactctcacaaacgaaccctctgaacagtttgccaacaagttcatgcagatgacacccttcacccgttggaggcttcgtctgtctgcgtccgcaaaagagaatgcaggattagcctttcccacggctacagcacttgactccactacccagattgtcatcactttccatgttacggccatcagacaaattgactggcggcacgacgaagag

SEQ ID NO: 376 - DNA, 2601 bp, Artificial Sequence
  Synthetic
atggctctcgtggattacggcaagcttttcgaggatctgaaccagataagcatgggtgtactggatcgggtagagttttcagaggtgatggtgatccacaggatgtatgtgaggctagctgatctgaatgtggggcagctcgagggagccgagaaagtgaagcgcttgtatatttttgccgacattatcgagctaccagtcgtggaatggcggtggccgccgcaaataccaggatcggtgacggtgatcatattgtgtcgtcttcttcaatggccaactgatgggaggcagtcggacaccgagctccacctgacattcatgaagttgcatgccatacaacgagaggaaaatcggtgggagataaccgcagcagatggcatgaactggggagtttacatacacgcagaggaagtacaggttggcgtgctgacaatgtcatggtcttcggtacttagagtttcggcacttcgctctgttataacctccggctttcgcgccgttagtgtgtttgaggtaccgggaagtgtaaggtccacccttggagctactttaaggcccgatcacgccttatatagtacaactatgcaagccacacccaacgcatcgcatattagtgcttttaaccttcgcatagtttccccgtcggcatatcgtgtttgtcctctccaaaatgacacagatacctacttaggtattccagcagacgtggcggcagttcttccagtagacgtggtgactgatcctaacatcttgctgggcatgcagacaacggtacacattgcggagctagtcaaggcatgtcatccgtcacccgatgttgtgagcgctgtaggggagcacctgaactggctcaacaaactcttactcccacttaaggaatcgactcagttgcaaggaagcgagtcgtacaaggagtgccttgcactcttgggtcgtgttcacgctgcgatgaagatggtgagaattggcttagtagtgccccagctgcaatacagaatgtacggtagcctcatcaaccaaatggcccaagtagcacaaaactacgaccgagaattcaagcaattcaaattattcatcatccaaaatcaaatccttggcagctatttgctgcagcagaacagggcatttgctgagagggagctgcagatggagagctttcatgctgctgtcatttctcaaagaagggaggagttggacaatacattcgcaaagatggaccgattgagcgggcaaatggaggcagagagtagtgcaatggagcaagccaaaaaggaaatggacgaaggattgaggcagttccagaataggcaagttgcgaacgccctctttgccgttcttagcgctgtagctcagattgggcttgcattccttacggctggtgcaacggctcctggagctgtggcgtcggcggggcaagctgtgagcatagcaggtcaggcggcgcaaggtctgcgaagggtggtggaaattctagagcagctggaggctgtgatggaggttgtggctgctgtgaaggacctcgtggattcattggaacaggtaggtcagattgtggacgcaccggtgatgccggaattgccctcagaggcggactggtccatttttgtgaacgaggtggaggccgtggcagagggcatgccaacggaagtctcggaggttccggtgtggatggtcaagtgcaagaatgtggctgcactgggtcgggagatgagcatcacggcagtacagatgtcggagctgcagtatgacatctgggtgcaaggcatgatgcgggatatggctcgaagccaggcagacaggctggccgcaattcaacccgcggaccttaccaactatttggagatggctacccagatggatatgcggactacgaggatgctgctggggctcctcaacatattgcgcatccagaatgcggcgctcaggtacgagtatcttctaatgcccacggagctcacaacatggccactgggtatggataccgtgggtgacttgctcatcgcgcaggagaatgctgcactgataggattaatgcagctagggccctcatctgatttcacgagcaggcatgtggtgaaagacatacctgtgaacttgctgctcgatggcgaggattgggagtttgagattcctgtgcaagctggcatgtccagcttcccttccagctggtctcgcgtccgtattcggcacctggagatgcactttgtgaaggaggccagcggtattggtggtgagattatccaccagcctaccacccagactgggaccgtttacatccttctgcagggttccactatcttccatgaccgcagaagagaccaggtgttgccttttcaggccgctgctccgctcaactaccattacgcgtaccgcctcgacaccggcgactccactctcacaaacgaaccctctgaacagtttgccaacaagttcatgcagatgacacccttcacccgttggaggcttcgtctgtctgcgtccgcaaaagagaatgcaggattagcctttcccacggctacagcacttgactccactacccagattgtcatcactttccatgttacggccatcagacaaattgactggcggcacgacgaagag

SEQ ID NO: 377 - DNA, 2601 bp, Artificial Sequence
  Synthetic
atggctctcgtggattacggcaagcttttcgaggatctgaaccagataagcatgggtgtactggatcgggtagagttttcagaggtgatggtgatccacaggatgtatgtgaggctagctgatctgaatgtggggcagctcgagggagccgagaaagtgaagcgcttgtatatttttgccgacattatcgagctaccagtcgtggaatggcggtggccgccgcaaataccaggatcggtgacggtgatcatattgtgtcgtcttcttcaatggccaactgatgggaggcagtcggacaccgagctccacctgacattcatgaagttgcatgccatacaacgagaggaaaatcggtgggagataaccgcagcagatggcatgaactggggagtttacatacacgcagaggaagtacaggttggcgtgctgacaatgtcatggtcttcggtacttagagtttcggcacttcgctctgttataacctccggctttcgcgccgttagtgtgtttgaggtaccgggaagtgtaaggtccacccttggagctactttaaggcccgatcacgccttatatagtacaactatgcaagccacacccaacgcatcgcatattagtgcttttaaccttcgcatagtttccccgtcggcatatcgtgtttgtcctctccaaaatgacacagatacctacttaggtattccagcagacgtggcggcagttcttccagtagacgtggtgactgatcctaacatcttgctgggcatgcagacaacggtacacattgcggagctagtcaaggcatgtcatccgtcacccgatgttgtgagcgctgtaggggagcacctgaactggctcaacaaactcttactcccacttaaggaatcgactcagttgcaaggaagcgagtcgtacaaggagtgccttgcactcttgggtcgtgttcacgctgcgatgaagatggtgagaattggcttagtagtgccccagctgcaatacagaatgtacggtagcctcatcaaccaaatggcccaagtagcacaaaactacgaccgagaattcaagcaattcaaattattcatcatccaaaatcaaatccttggcagctatttgctgcagcagaacagggcatttgctgagagggagctgcagatggagagctttcatgctgctgtcatttctcaaagaagggaggagttggacaatacattcgcaaagatggaccgattgagcgggcaaatggaggcagagagtagtgcaatggagcaagccaaaaaggaaatggacgaaggattgaggcagttccagaataggcaagttgcgaacgccctctttgccgttcttagcgctgtagctcagattgggcttgcattccttacggctggtgcaacggctcctggagctgtggcgtcggcggggcaagctgtgagcatagcaggtcaggcggcgcaaggtctgcgaagggtggtggaaattctagagcagctggaggctgtgatggaggttgtggctgctgtgaaggacctcgtggattcattggaacaggtaggtcagattgtggacgcaccggtgatgccggaattgccctcagaggcggactggtccatttttgtgaacgaggtggaggccgtggcagagggcatgccaacggaagtctcggaggttccggtgtggcaggccaggtgcaagaatgtggctgcactgggtcgggagatgagcatcacggcagtacagatgtcggagctgcagtatgacatctgggtgcaaggcatgatgcgggatatggctcgaagccaggcagacaggctggccgcaattcaacccgcggaccttaccaactatttggagatggctacccagatggatatgcggactacgaggatgctgctggggctcctcaacatattgcgcatccagaatgcggcgctcaggtacgagtatcttctaatgcccacggagctcacaacatggccactgggtatggataccgtgggtgacttgctcatcgcgcaggagaatgctgcactgataggattaatgcagctagggccctcatctgatttcacgagcaggcatgtggtgaaagacatacctgtgaacttgctgctcgatggcgaggattgggagtttgagattcctgtgcaagctggcatgtccagcttcccttccagctggtctcgcgtccgtattcggcacctggagatgcactttgtgaaggaggccagcggtattggtggtgagattatccaccagcctaccacccagactgggaccgtttacatccttctgcagggttccactatcttccatgaccgcagaagagaccaggtgttgccttttcaggccgctgctccgctcaactaccattacgcgtaccgcctcgacaccggcgactccactctcacaaacgaaccctctgaacagtttgccaacaagttcatgcagatgacacccttcacccgttggaggcttcgtctgtctgcgtccgcaaaagagaatgcaggattagcctttcccacggctacagcacttgactccactacccagattgtcatcactttccatgttacggccatcagacaaattgactggcggcacgacgaagag

SEQ ID NO: 378 - DNA, 2601 bp, Artificial Sequence
  Synthetic
atggctctcgtggattacggcaagcttttcgaggatctgaaccagataagcatgggtgtactggatcgggtagagttttcagaggtgatggtgatccacaggatgtatgtgaggctagctgatctgaatgtggggcagctcgagggagccgaggaagtgaagcgcttgtatatttttgccgacattatcgagctaccagtcgtggaatggcggtggccgccgcaaataccaggatcggtgacggtgatcatattgtgtcgtcttcttcaatggccaactgatgggaggcagtcggacaccgagctccacctgacattcatgaagttgcatgccatacaacgagaggaaaatcggtgggagataaccgcagcagatggcatgaactggggagtttacatacacgcagaggaagtacaggttggcgtgctgacaatgtcatggtcttcggtacttagagtttcggcacttcgctctgttataacctccggctttcgcgccgttagtgtgtttgaggtaccgggaagtgtaaggtccacccttggagctactttaaggcccgatcacgccttatatagtacaactatgcaagccacacccaacgcatcgcatattagtgcttttaaccttcgcatagtttccccgtcggcatatcgtgtttgtcctctccaaaatgacacagatacctacttaggtattccagcagacgtggcggcagttcttccagtagacgtggtgactgatcctaacatcttgctgggcatgcagacaacggtacacattgcggagctagtcaaggcatgtcatccgtcacccgatgttgtgagcgctgtaggggagcacctgaactggctcaacaaactcttactcccacttaaggaatcgactcagttgcaaggaagcgagtcgtacaaggagtgccttgcactcttgggtcgtgttcacgctgcgatgaagatggtgagaattggcttagtagtgccccagctgcaatacagaatgtacggtagcctcatcaaccaaatggcccaagtagcacaaaactacgaccgagaattcaagcaattcaaattattcatcatccaaaatcaaatccttggcagctatttgctgcagcagaacagggcatttgctgagagggagctgcagatggagagctttcatgctgctgtcatttctcaaagaagggaggagttggacaatacattcgcaaagatggaccgattgagcgggcaaatggaggcagagagtagtgcaatggagcaagccaaaaaggaaatggacgaaggattgaggcagttccagaataggcaagttgcgaacgccctctttgccgttcttagcgctgtagctcagattgggcttgcattccttacggctggtgcaacggctcctggagctgtggcgtcggcggggcaagctgtgagcatagcaggtcaggcggcgcaaggtctgcgaagggtggtggaaattctagagcagctggaggctgtgatggaggttgtggctgctgtgaatgacctcgtggattcattggaacaggtaggtcagattgtggacgcaccggtgatgccggaattgccctcagaggcggactggtccatttttgtgaacgaggtggaggccgtggcagagggcatgccaacggaagtctcggaggttccggtgtggaggggcaagtgcaagagcgtggctgcactgggtcgggagatgagcatcacggcagtacagatgtcggagctgcagtatgacatctgggtgcaaggcatgatgcgggatatggctcgaagccaggcagacaggctggccgcaattcaacccgcggaccttaccaactatttggagatggctacccagatggatatgcggactacgaggatgctgctggggctcctcaacatattgcgcatccagaatgcggcgctcaggtacgagtatcttctaatgcccacggagctcacaacatggccactgggtatggataccgtgggtgacttgctcatcgcgcaggagaatgctgcactgataggattaatgcagctagggccctcatctgatttcacgagcaggcatgtggtgaaagacatacctgtgaacttgctgctcgatggcgaggattgggagtttgagattcctgtgcaagctggcatgtccagcttcccttccagctggtctcgcgtccgtattcggcacctggagatgcactttgtgaaggaggccagcggtattggtggtgagattatccaccagcctaccacccagactgggaccgtttacatccttctgcagggttccactatcttccatgaccgcagaagagaccaggtgttgccttttcaggccgctgctccgctcaactaccattacgcgtaccgcctcgacaccggcgactccactctcacaaacgaaccctctgaacagtttgccaacaagttcatgcagatgacacccttcacccgttggaggcttcgtctgtctgcgtccgcaaaagagaatgcaggattagcctttcccacggctacagcacttgactccactacccagattgtcatcactttccatgttacggccatcagacaaattgactggcggcacgacgaagag

SEQ ID NO: 379 - DNA, 2601 bp, Artificial Sequence
  Synthetic
atggctctcgtggattacggcaagcttttcgaggatctgaaccagataagcatgggtgtactggatcgggtagagttttcagaggtgatggtgatccacaggatgtatgtgaggctagctgatctgaatgtggggcagctcgagggagccgagaaagtgaagcgcttgtatatttttgccgacattatcgagctaccagtcgtggaatggcggtggccgccgcaaataccaggatcggtgacggtgatcatattgtgtcgtcttcttcaatggccaactgatgggaggcagtcggacaccgagctccacctgacattcatgaagttgcatgccatacaacgagaggaaaatcggtgggagataaccgcagcagatggcatgaactggggagtttacatacacgcagaggaagtacaggttggcgtgctgacaatgtcatggtcttcggtacttagagtttcggcacttcgctctgttataacctccggctttcgcgccgttagtgtgtttgaggtaccgggaagtgtaaggtccacccttggagctactttaaggcccgatcacgccttatatagtacaactatgcaagccacacccaacgcatcgcatattagtgcttttaaccttcgcatagtttccccgtcggcatatcgtgtttgtcctctccaaaatgacacagatacctacttaggtattccagcagacgtggcggcagttcttccagtagacgtggtgactgatcctaacatcttgctgggcatgcagacaacggtacacattgcggagctagtcaaggcatgtcatccgtcacccgatgttgtgagcgctgtaggggagcacctgaactggctcaacaaactcttactcccacttaaggaatcgactcagttgcaaggaagcgagtcgtacaaggagtgccttgcactcttgggtcgtgttcacgctgcgatgaagatggtgagaattggcttagtagtgccccagctgcaatacagaatgtacggtagcctcatcaaccaaatggcccaagtagcacaaaactacgaccgagaattcaagcaattcaaattattcatcatccaaaatcaaatccttggcagctatttgctgcagcagaacagggcatttgctgagagggagctgcagatggagagctttcatgctgctgtcatttctcaaagaagggaggagttggacaatacattcgcaaagatggaccgattgagcgggcaaatggaggcagagagtagtgcaatggagcaagccaaaaaggaaatggacgaaggattgaggcagttccagaataggcaagttgcgaacgccctctttgccgttcttagcgctgtagctcagattgggcttgcattccttacggctggtgcaacggctcctggagctgtggcgtcggcggggcaagctgtgagcatagcaggtcaggcggcgcaaggtctgcgaagggtggtggaaattctagagcagctggaggctgtgatggaggttgtggctgctgtgaaggacctcgtggattcattggaacaggtaggtcagattgtggacgcaccggtgatgccggaattgccctcagaggcggactggtccatttttgtgaacgaggtggaggccgtggcagagggcatgccaacggaagtctcggaggttccggtgtggaggggccggtgcaagaccgtggctgcactgggtcgggagatgagcatcacggcagtacagatgtcggagctgcagtatgacatctgggtgcaaggcatgatgcgggatatggctcgaagccaggcagacaggctggccgcaattcaacccgcggaccttaccaactatttggagatggctacccagatggatatgcggactacgaggatgctgctggggctcctcaacatattgcgcatccagaatgcggcgctcaggtacgagtatcttctaatgcccacggagctcacaacatggccactgggtatggataccgtgggtgacttgctcatcgcgcaggagaatgctgcactgataggattaatgcagctagggccctcatctgatttcacgagcaggcatgtggtgaaagacatacctgtgaacttgctgctcgatggcgaggattgggagtttgagattcctgtgcaagctggcatgtccagcttcccttccagctggtctcgcgtccgtattcggcacctggagatgcactttgtgaaggaggccagcggtattggtggtgagattatccaccagcctaccacccagactgggaccgtttacatccttctgcagggttccactatcttccatgaccgcagaagagaccaggtgttgccttttcaggccgctgctccgctcaactaccattacgcgtaccgcctcgacaccggcgactccactctcacaaacgaaccctctgaacagtttgccaacaagttcatgcagatgacacccttcacccgttggaggcttcgtctgtctgcgtccgcaaaagagaatgcaggattagcctttcccacggctacagcacttgactccactacccagattgtcatcactttccatgttacggccatcagacaaattgactggcggcacgacgaagag

SEQ ID NO: 380 - DNA, 2601 bp, Artificial Sequence
  Synthetic
atggctctcgtggattacggcaagcttttcgaggatctgaaccagataagcatgggtgtactggatcgggtagagttttcagaggtgatggtgatccacaggatgtatgtgaggctagctgatctgaatgtggggcagctcgagggagccgagaaagtgaagcgcttgtatatttttaccgacgttatcgagctaccagtcgtggaatggcggtggccgccgcaaataccaggatcggtgacggtgatcatattgtgtcgtcttcttcaatggccaactgatgggaggcagtcggacaccgagctccacctgacattcatgaagttgcatgccatacaacgagaggaaaatcggtgggagataaccgcagcagatggcatgaactggggagtttacatacacgcagaggaagtacaggttggcgtgctgacaatgtcatggtcttcggtacttagagtttcggcacttcgctctgttataacctccggctttcgcgccgttagtgtgtttgaggtaccgggaagtgtaaggtccacccttggagctactttaaggcccgatcacgccttatatagtacaactatgcaagccacacccaacgcatcgcatattagtgcttttaaccttcgcatagtttccccgtcggcatatcgtgtttgtcctctccaaaatgacacagatacctacttaggtattccagcagacgtggcggcagttcttccagtagacgtggtgactgatcctaacatcttgctgggcatgcagacaacggtacacattgcggagctagtcaaggcatgtcatccgtcacccgatgttgtgagcgctgtaggggagcacctgaactggctcaacaaactcttactcccacttaaggaatcgactcagttgcaaggaagcgagtcgtacaaggagtgccttgcactcttgggtcgtgttcacgctgcgatgaagatggtgagaattggcttagtagtgccccagctgcaatacagaatgtacggtagcctcatcaaccaaatggcccaagtagcacaaaactacgaccgagaattcaagcaattcaaattattcatcatccaaaatcaaatccttggcagctatttgctgcagcagaacagggcatttgctgagagggagctgcagatggagagctttcatgctgctgtcatttctcaaagaagggaggagttggacaatacattcgcaaagatggaccgattgagcgggcaaatggaggcagagagtagtgcaatggagcaagccaaaaaggaaatggacgaaggattgaggcagttccagaataggcaagttgcgaacgccctctttgccgttcttagcgctgtagctcagattgggcttgcattccttacggctggtgcaacggctcctggagctgtggcgtcggcggggcaagctgtgagcatagcaggtcaggcggcgcaaggtctgcgaagggtggtggaaattctagagcagctggaggctgtgatggaggttgtggctgctgtgaaggacctcgtggattcattggaacaggtaggtcagattgtggacgcaccggtgatgccggaattgccctcagaggcggactggtccatttttgtgaacgaggtggaggccgtggcagagggcatgccaacggaagtctcggaggttccggtgtggatcggcaagtgcaagaatgtggctgcactgggtcgggagatgagcatcacggcagtacagatgtcggagctgcagtatgacatctgggtgcaaggcatgatgcgggatatggctcgaagccaggcagacaggctggccgcaattcaacccgcggaccttaccaactatttggagatggctacccagatggatatgcggactacgaggatgctgctggggctcctcaacatattgcgcatccagaatgcggcgctcaggtacgagtatcttctaatgcccacggagctcacaacatggccactgggtatggataccgtgggtgacttgctcatcgcgcaggagaatgctgcactgataggattaatgcagctagggccctcatctgatttcacgagcaggcatgtggtgaaagacatacctgtgaacttgctgctcgatggcgaggattgggagtttgagattcctgtgcaagctggcatgtccagcttcccttccagctggtctcgcgtccgtattcggcacctggagatgcactttgtgaaggaggccagcggtattggtggtgagattatccaccagcctaccacccagactgggaccgtttacatccttctgcagggttccactatcttccatgaccgcagaagagaccaggtgttgccttttcaggccgctgctccgctcaactaccattacgcgtaccgcctcgacaccggcgactccactctcacaaacgaaccctctgaacagtttgccaacaagttcatgcagatgacacccttcacccgttggaggcttcgtctgtctgcgtccgcaaaagagaatgcaggattagcctttcccacggctacagcacttgactccactacccagattgtcatcactttccatgttacggccatcagacaaattgactggcggcacgacgaagag

SEQ ID NO: 381 - DNA, 2601 bp, Artificial Sequence
  Synthetic
atggctctcgtggattacggcaagcttttcgaggatctgaaccagataagcatgggtgtactggatcgggtagagttttcagaggtgatggtgatccacaggatgtatgtgaggctagctgatctgaatgtggggcagctcgagggagccgagaaagtgaagcgcttgtatgttttttgcgacattatcgagctaccagtcgtggaatggcggtggccgccgcaaataccaggatcggtgacggtgatcatattgtgtcgtcttcttcaatggccaactgatgggaggcagtcggacaccgagctccacctgacattcatgaagttgcatgccatacaacgagaggaaaatcggtgggagataaccgcagcagatggcatgaactggggagtttacatacacgcagaggaagtacaggttggcgtgctgacaatgtcatggtcttcggtacttagagtttcggcacttcgctctgttataacctccggctttcgcgccgttagtgtgtttgaggtaccgggaagtgtaaggtccacccttggagctactttaaggcccgatcacgccttatatagtacaactatgcaagccacacccaacgcatcgcatattagtgcttttaaccttcgcatagtttccccgtcggcatatcgtgtttgtcctctccaaaatgacacagatacctacttaggtattccagcagacgtggcggcagttcttccagtagacgtggtgactgatcctaacatcttgctgggcatgcagacaacggtacacattgcggagctagtcaaggcatgtcatccgtcacccgatgttgtgagcgctgtaggggagcacctgaactggctcaacaaactcttactcccacttaaggaatcgactcagttgcaaggaagcgagtcgtacaaggagtgccttgcactcttgggtcgtgttcacgctgcgatgaagatggtgagaattggcttagtagtgccccagctgcaatacagaatgtacggtagcctcatcaaccaaatggcccaagtagcacaaaactacgaccgagaattcaagcaattcaaattattcatcatccaaaatcaaatccttggcagctatttgctgcagcagaacagggcatttgctgagagggagctgcagatggagagctttcatgctgctgtcatttctcaaagaagggaggagttggacaatacattcgcaaagatggaccgattgagcgggcaaatggaggcagagagtagtgcaatggagcaagccaaaaaggaaatggacgaaggattgaggcagttccagaataggcaagttgcgaacgccctctttgccgttcttagcgctgtagctcagattgggcttgcattccttacggctggtgcaacggctcctggagctgtggcgtcggcggggcaagctgtgagcatagcaggtcaggcggcgcaaggtctgcgaagggtggtggaaattctagagcagctggaggctgtgatggaggttgtggctgctgtgaaggacctcgtggattcattggaacaggtaggtcagattgtggacgcaccggtgatgccggaattgccctcagaggcggactggtccatttttgtgaacgaggtggaggccgtggcagagggcatgccaacggaagtctcggaggttccggtgtggctggccaggtgcaagaatgtggctgcactgggtcgggagatgagcatcacggcagtacagatgtcggagctgcagtatgacatctgggtgcaaggcatgatgcgggatatggctcgaagccaggcagacaggctggccgcaattcaacccgcggaccttaccaactatttggagatggctacccagatggatatgcggactacgaggatgctgctggggctcctcaacatattgcgcatccagaatgcggcgctcaggtacgagtatcttctaatgcccacggagctcacaacatggccactgggtatggataccgtgggtgacttgctcatcgcgcaggagaatgctgcactgataggattaatgcagctagggccctcatctgatttcacgagcaggcatgtggtgaaagacatacctgtgaacttgctgctcgatggcgaggattgggagtttgagattcctgtgcaagctggcatgtccagcttcccttccagctggtctcgcgtccgtattcggcacctggagatgcactttgtgaaggaggccagcggtattggtggtgagattatccaccagcctaccacccagactgggaccgtttacatccttctgcagggttccactatcttccatgaccgcagaagagaccaggtgttgccttttcaggccgctgctccgctcaactaccattacgcgtaccgcctcgacaccggcgactccactctcacaaacgaaccctctgaacagtttgccaacaagttcatgcagatgacacccttcacccgttggaggcttcgtctgtctgcgtccgcaaaagagaatgcaggattagcctttcccacggctacagcacttgactccactacccagattgtcatcactttccatgttacggccatcagacaaattgactggcggcacgacgaagag

SEQ ID NO: 382 - DNA, 2601 bp, Artificial Sequence
  Synthetic
atggctctcgtggattacggcaagcttttcgaggatctgaaccagataagcatgggtgtactggatcgggtagagttttcagaggtgatggtgatccacaggatgtatgtgaggctagctgatctgaatgtggggcagctcgagggagccgagaaagtgaagcgcttgtatgtttttagcgacattatcgagctaccagtcgtggaatggcggtggccgccgcaaataccaggatcggtgacggtgatcatattgtgtcgtcttcttcaatggccaactgatgggaggcagtcggacaccgagctccacctgacattcatgaagttgcatgccatacaacgagaggaaaatcggtgggagataaccgcagcagatggcatgaactggggagtttacatacacgcagaggaagtacaggttggcgtgctgacaatgtcatggtcttcggtacttagagtttcggcacttcgctctgttataacctccggctttcgcgccgttagtgtgtttgaggtaccgggaagtgtaaggtccacccttggagctactttaaggcccgatcacgccttatatagtacaactatgcaagccacacccaacgcatcgcatattagtgcttttaaccttcgcatagtttccccgtcggcatatcgtgtttgtcctctccaaaatgacacagatacctacttaggtattccagcagacgtggcggcagttcttccagtagacgtggtgactgatcctaacatcttgctgggcatgcagacaacggtacacattgcggagctagtcaaggcatgtcatccgtcacccgatgttgtgagcgctgtaggggagcacctgaactggctcaacaaactcttactcccacttaaggaatcgactcagttgcaaggaagcgagtcgtacaaggagtgccttgcactcttgggtcgtgttcacgctgcgatgaagatggtgagaattggcttagtagtgccccagctgcaatacagaatgtacggtagcctcatcaaccaaatggcccaagtagcacaaaactacgaccgagaattcaagcaattcaaattattcatcatccaaaatcaaatccttggcagctatttgctgcagcagaacagggcatttgctgagagggagctgcagatggagagctttcatgctgctgtcatttctcaaagaagggaggagttggacaatacattcgcaaagatggaccgattgagcgggcaaatggaggcagagagtagtgcaatggagcaagccaaaaaggaaatggacgaaggattgaggcagttccagaataggcaagttgcgaacgccctctttgccgttcttagcgctgtagctcagattgggcttgcattccttacggctggtgcaacggctcctggagctgtggcgtcggcggggcaagctgtgagcatagcaggtcaggcggcgcaaggtctgcgaagggtggtggaaattctagagcagctggaggctgtgatggaggttgtggctgctgtgaaggacctcgtggattcattggaacaggtaggtcagattgtggacgcaccggtgatgccggaattgccctcagaggcggactggtccatttttgtgaacgaggtggaggccgtggcagagggcatgccaacggaagtctcggaggttccggtgtggatcggcaagtgcaagaatgtggctgcactgggtcgggagatgagcatcacggcagtacagatgtcggagctgcagtatgacatctgggtgcaaggcatgatgcgggatatggctcgaagccaggcagacaggctggccgcaattcaacccgcggaccttaccaactatttggagatggctacccagatggatatgcggactacgaggatgctgctggggctcctcaacatattgcgcatccagaatgcggcgctcaggtacgagtatcttctaatgcccacggagctcacaacatggccactgggtatggataccgtgggtgacttgctcatcgcgcaggagaatgctgcactgataggattaatgcagctagggccctcatctgatttcacgagcaggcatgtggtgaaagacatacctgtgaacttgctgctcgatggcgaggattgggagtttgagattcctgtgcaagctggcatgtccagcttcccttccagctggtctcgcgtccgtattcggcacctggagatgcactttgtgaaggaggccagcggtattggtggtgagattatccaccagcctaccacccagactgggaccgtttacatccttctgcagggttccactatcttccatgaccgcagaagagaccaggtgttgccttttcaggccgctgctccgctcaactaccattacgcgtaccgcctcgacaccggcgactccactctcacaaacgaaccctctgaacagtttgccaacaagttcatgcagatgacacccttcacccgttggaggcttcgtctgtctgcgtccgcaaaagagaatgcaggattagcctttcccacggctacagcacttgactccactacccagattgtcatcactttccatgttacggccatcagacaaattgactggcggcacgacgaagag

SEQ ID NO: 383 - DNA, 2601 bp, Artificial Sequence
  Synthetic
atggctctcgtggattacggcaagcttttcgaggatctgaaccagataagcatgggtgtactggatcgggtagagttttcagaggtgatggtgatccacaggatgtatgtgaggctagctgatctgaatgtggggcagctcgagggagccgagaaagtgaagcgcttgtatgtttttagcgacattatcgagctaccagtcgtggaatggcggtggccgccgcaaataccaggatcggtgacggtgatcatattgtgtcgtcttcttcaatggccaactgatgggaggcagtcggacaccgagctccacctgacattcatgaagttgcatgccatacaacgagaggaaaatcggtgggagataaccgcagcagatggcatgaactggggagtttacatacacgcagaggaagtacaggttggcgtgctgacaatgtcatggtcttcggtacttagagtttcggcacttcgctctgttataacctccggctttcgcgccgttagtgtgtttgaggtaccgggaagtgtaaggtccacccttggagctactttaaggcccgatcacgccttatatagtacaactatgcaagccacacccaacgcatcgcatattagtgcttttaaccttcgcatagtttccccgtcggcatatcgtgtttgtcctctccaaaatgacacagatacctacttaggtattccagcagacgtggcggcagttcttccagtagacgtggtgactgatcctaacatcttgctgggcatgcagacaacggtacacattgcggagctagtcaaggcatgtcatccgtcacccgatgttgtgagcgctgtaggggagcacctgaactggctcaacaaactcttactcccacttaaggaatcgactcagttgcaaggaagcgagtcgtacaaggagtgccttgcactcttgggtcgtgttcacgctgcgatgaagatggtgagaattggcttagtagtgccccagctgcaatacagaatgtacggtagcctcatcaaccaaatggcccaagtagcacaaaactacgaccgagaattcaagcaattcaaattattcatcatccaaaatcaaatccttggcagctatttgctgcagcagaacagggcatttgctgagagggagctgcagatggagagctttcatgctgctgtcatttctcaaagaagggaggagttggacaatacattcgcaaagatggaccgattgagcgggcaaatggaggcagagagtagtgcaatggagcaagccaaaaaggaaatggacgaaggattgaggcagttccagaataggcaagttgcgaacgccctctttgccgttcttagcgctgtagctcagattgggcttgcattccttacggctggtgcaacggctcctggagctgtggcgtcggcggggcaagctgtgagcatagcaggtcaggcggcgcaaggtctgcgaagggtggtggaaattctagagcagctggaggctgtgatggaggttgtggctgctgtgaaggacctcgtggattcattggaacaggtaggtcagattgtggacgcaccggtgatgccggaattgccctcagaggcggactggtccatttttgtgaacgaggtggaggccgtggcagagggcatgccaacggaagtctcggaggttccggtgtggaggggccggtgcaagaccgtggctgcactgggtcgggagatgagcatcacggcagtacagatgtcggagctgcagtatgacatctgggtgcaaggcatgatgcgggatatggctcgaagccaggcagacaggctggccgcaattcaacccgcggaccttaccaactatttggagatggctacccagatggatatgcggactacgaggatgctgctggggctcctcaacatattgcgcatccagaatgcggcgctcaggtacgagtatcttctaatgcccacggagctcacaacatggccactgggtatggataccgtgggtgacttgctcatcgcgcaggagaatgctgcactgataggattaatgcagctagggccctcatctgatttcacgagcaggcatgtggtgaaagacatacctgtgaacttgctgctcgatggcgaggattgggagtttgagattcctgtgcaagctggcatgtccagcttcccttccagctggtctcgcgtccgtattcggcacctggagatgcactttgtgaaggaggccagcggtattggtggtgagattatccaccagcctaccacccagactgggaccgtttacatccttctgcagggttccactatcttccatgaccgcagaagagaccaggtgttgccttttcaggccgctgctccgctcaactaccattacgcgtaccgcctcgacaccggcgactccactctcacaaacgaaccctctgaacagtttgccaacaagttcatgcagatgacacccttcacccgttggaggcttcgtctgtctgcgtccgcaaaagagaatgcaggattagcctttcccacggctacagcacttgactccactacccagattgtcatcactttccatgttacggccatcagacaaattgactggcggcacgacgaagag

SEQ ID NO: 384 - DNA, 2601 bp, Artificial Sequence
  Synthetic
atggctctcgtggattacggcaagcttttcgaggatctgaaccagataagcatgggtgtactggatcgggtagagttttcagaggtgatggtgatccacaggatgtatgtgaggctagctgatctgaatgtggggcagctcgagggagccgagaaagtgaagcgcttgtatgttttttccgacgttatcgagctaccagtcgtggaatggcggtggccgccgcaaataccaggatcggtgacggtgatcatattgtgtcgtcttcttcaatggccaactgatgggaggcagtcggacaccgagctccacctgacattcatgaagttgcatgccatacaacgagaggaaaatcggtgggagataaccgcagcagatggcatgaactggggagtttacatacacgcagaggaagtacaggttggcgtgctgacaatgtcatggtcttcggtacttagagtttcggcacttcgctctgttataacctccggctttcgcgccgttagtgtgtttgaggtaccgggaagtgtaaggtccacccttggagctactttaaggcccgatcacgccttatatagtacaactatgcaagccacacccaacgcatcgcatattagtgcttttaaccttcgcatagtttccccgtcggcatatcgtgtttgtcctctccaaaatgacacagatacctacttaggtattccagcagacgtggcggcagttcttccagtagacgtggtgactgatcctaacatcttgctgggcatgcagacaacggtacacattgcggagctagtcaaggcatgtcatccgtcacccgatgttgtgagcgctgtaggggagcacctgaactggctcaacaaactcttactcccacttaaggaatcgactcagttgcaaggaagcgagtcgtacaaggagtgccttgcactcttgggtcgtgttcacgctgcgatgaagatggtgagaattggcttagtagtgccccagctgcaatacagaatgtacggtagcctcatcaaccaaatggcccaagtagcacaaaactacgaccgagaattcaagcaattcaaattattcatcatccaaaatcaaatccttggcagctatttgctgcagcagaacagggcatttgctgagagggagctgcagatggagagctttcatgctgctgtcatttctcaaagaagggaggagttggacaatacattcgcaaagatggaccgattgagcgggcaaatggaggcagagagtagtgcaatggagcaagccaaaaaggaaatggacgaaggattgaggcagttccagaataggcaagttgcgaacgccctctttgccgttcttagcgctgtagctcagattgggcttgcattccttacggctggtgcaacggctcctggagctgtggcgtcggcggggcaagctgtgagcatagcaggtcaggcggcgcaaggtctgcgaagggtggtggaaattctagagcagctggaggctgtgatggaggttgtggctgctgtgaaggacctcgtggattcattggaacaggtaggtcagattgtggacgcaccggtgatgccggaattgccctcagaggcggactggtccatttttgtgaacgaggtggaggccgtggcagagggcatgccaacggaagtctcggaggttccggtgtggaggggcaagtgcaagagcgtggctgcactgggtcgggagatgagcatcacggcagtacagatgtcggagctgcagtatgacatctgggtgcaaggcatgatgcgggatatggctcgaagccaggcagacaggctggccgcaattcaacccgcggaccttaccaactatttggagatggctacccagatggatatgcggactacgaggatgctgctggggctcctcaacatattgcgcatccagaatgcggcgctcaggtacgagtatcttctaatgcccacggagctcacaacatggccactgggtatggataccgtgggtgacttgctcatcgcgcaggagaatgctgcactgataggattaatgcagctagggccctcatctgatttcacgagcaggcatgtggtgaaagacatacctgtgaacttgctgctcgatggcgaggattgggagtttgagattcctgtgcaagctggcatgtccagcttcccttccagctggtctcgcgtccgtattcggcacctggagatgcactttgtgaaggaggccagcggtattggtggtgagattatccaccagcctaccacccagactgggaccgtttacatccttctgcagggttccactatcttccatgaccgcagaagagaccaggtgttgccttttcaggccgctgctccgctcaactaccattacgcgtaccgcctcgacaccggcgactccactctcacaaacgaaccctctgaacagtttgccaacaagttcatgcagatgacacccttcacccgttggaggcttcgtctgtctgcgtccgcaaaagagaatgcaggattagcctttcccacggctacagcacttgactccactacccagattgtcatcactttccatgttacggccatcagacaaattgactggcggcacgacgaagag

SEQ ID NO: 385 - DNA, 2601 bp, Artificial Sequence
  Synthetic
atggctctcgtggattacggcaagcttttcgaggatctgaaccagataagcatgggtgtactggatcgggtagagttttcagaggtgatggtgatccacaggatgtatgtgaggctagctgatctgaatgtggggcagctcgagggagccgagaaagtgaagcgcttgtatgttttttccgacgttatcgagctaccagtcgtggaatggcggtggccgccgcaaataccaggatcggtgacggtgatcatattgtgtcgtcttcttcaatggccaactgatgggaggcagtcggacaccgagctccacctgacattcatgaagttgcatgccatacaacgagaggaaaatcggtgggagataaccgcagcagatggcatgaactggggagtttacatacacgcagaggaagtacaggttggcgtgctgacaatgtcatggtcttcggtacttagagtttcggcacttcgctctgttataacctccggctttcgcgccgttagtgtgtttgaggtaccgggaagtgtaaggtccacccttggagctactttaaggcccgatcacgccttatatagtacaactatgcaagccacacccaacgcatcgcatattagtgcttttaaccttcgcatagtttccccgtcggcatatcgtgtttgtcctctccaaaatgacacagatacctacttaggtattccagcagacgtggcggcagttcttccagtagacgtggtgactgatcctaacatcttgctgggcatgcagacaacggtacacattgcggagctagtcaaggcatgtcatccgtcacccgatgttgtgagcgctgtaggggagcacctgaactggctcaacaaactcttactcccacttaaggaatcgactcagttgcaaggaagcgagtcgtacaaggagtgccttgcactcttgggtcgtgttcacgctgcgatgaagatggtgagaattggcttagtagtgccccagctgcaatacagaatgtacggtagcctcatcaaccaaatggcccaagtagcacaaaactacgaccgagaattcaagcaattcaaattattcatcatccaaaatcaaatccttggcagctatttgctgcagcagaacagggcatttgctgagagggagctgcagatggagagctttcatgctgctgtcatttctcaaagaagggaggagttggacaatacattcgcaaagatggaccgattgagcgggcaaatggaggcagagagtagtgcaatggagcaagccaaaaaggaaatggacgaaggattgaggcagttccagaataggcaagttgcgaacgccctctttgccgttcttagcgctgtagctcagattgggcttgcattccttacggctggtgcaacggctcctggagctgtggcgtcggcggggcaagctgtgagcatagcaggtcaggcggcgcaaggtctgcgaagggtggtggaaattctagagcagctggaggctgtgatggaggttgtggctgctgtgaaggacctcgtggattcattggaacaggtaggtcagattgtggacgcaccggtgatgccggaattgccctcagaggcggactggtccatttttgtgaacgaggtggaggccgtggcagagggcatgccaacggaagtctcggaggttccggtgtggagggtcaagtgcaagaatgtggctgcactgggtcgggagatgagcatcacggcagtacagatgtcggagctgcagtatgacatctgggtgcaaggcatgatgcgggatatggctcgaagccaggcagacaggctggccgcaattcaacccgcggaccttaccaactatttggagatggctacccagatggatatgcggactacgaggatgctgctggggctcctcaacatattgcgcatccagaatgcggcgctcaggtacgagtatcttctaatgcccacggagctcacaacatggccactgggtatggataccgtgggtgacttgctcatcgcgcaggagaatgctgcactgataggattaatgcagctagggccctcatctgatttcacgagcaggcatgtggtgaaagacatacctgtgaacttgctgctcgatggcgaggattgggagtttgagattcctgtgcaagctggcatgtccagcttcccttccagctggtctcgcgtccgtattcggcacctggagatgcactttgtgaaggaggccagcggtattggtggtgagattatccaccagcctaccacccagactgggaccgtttacatccttctgcagggttccactatcttccatgaccgcagaagagaccaggtgttgccttttcaggccgctgctccgctcaactaccattacgcgtaccgcctcgacaccggcgactccactctcacaaacgaaccctctgaacagtttgccaacaagttcatgcagatgacacccttcacccgttggaggcttcgtctgtctgcgtccgcaaaagagaatgcaggattagcctttcccacggctacagcacttgactccactacccagattgtcatcactttccatgttacggccatcagacaaattgactggcggcacgacgaagag

SEQ ID NO: 386 - DNA, 2601 bp, Artificial Sequence
  Synthetic
atggctctcgtggattacggcaagcttttcgaggatctgaaccagataagcatgggtgtactggatcgggtagagttttcagaggtgatggtgatccacaggatgtatgtgaggctagctgatctgaatgtggggcagctcgagggagccgagaaagtgatgcggttgtatatttttgccgacgttgtcgagctaccagtcgtggaatggcggtggccgccgcaaataccaggatcggtgacggtgatcatattgtgtcgtcttcttcaatggccaactgatgggaggcagtcggacaccgagctccacctgacattcatgaagttgcatgccatacaacgagaggaaaatcggtgggagataaccgcagcagatggcatgaactggggagtttacatacacgcagaggaagtacaggttggcgtgctgacaatgtcatggtcttcggtacttagagtttcggcacttcgctctgttataacctccggctttcgcgccgttagtgtgtttgaggtaccgggaagtgtaaggtccacccttggagctactttaaggcccgatcacgccttatatagtacaactatgcaagccacacccaacgcatcgcatattagtgcttttaaccttcgcatagtttccccgtcggcatatcgtgtttgtcctctccaaaatgacacagatacctacttaggtattccagcagacgtggcggcagttcttccagtagacgtggtgactgatcctaacatcttgctgggcatgcagacaacggtacacattgcggagctagtcaaggcatgtcatccgtcacccgatgttgtgagcgctgtaggggagcacctgaactggctcaacaaactcttactcccacttaaggaatcgactcagttgcaaggaagcgagtcgtacaaggagtgccttgcactcttgggtcgtgttcacgctgcgatgaagatggtgagaattggcttagtagtgccccagctgcaatacagaatgtacggtagcctcatcaaccaaatggcccaagtagcacaaaactacgaccgagaattcaagcaattcaaattattcatcatccaaaatcaaatccttggcagctatttgctgcagcagaacagggcatttgctgagagggagctgcagatggagagctttcatgctgctgtcatttctcaaagaagggaggagttggacaatacattcgcaaagatggaccgattgagcgggcaaatggaggcagagagtagtgcaatggagcaagccaaaaaggaaatggacgaaggattgaggcagttccagaataggcaagttgcgaacgccctctttgccgttcttagcgctgtagctcagattgggcttgcattccttacggctggtgcaacggctcctggagctgtggcgtcggcggggcaagctgtgagcatagcaggtcaggcggcgcaaggtctgcgaagggtggtggaaattctagagcagctggaggctgtgatggaggttgtggctgctgtgaaggacctcgtggattcattggaacaggtaggtcagattgtggacgcaccggtgatgccggaattgccctcagaggcggactggtccatttttgtgaacgaggtggaggccgtggcagagggcatgccaacggaagtctcggaggttccggtgtggaggggcaagtgcaagagcgtggctgcactgggtcgggagatgagcatcacggcagtacagatgtcggagctgcagtatgacatctgggtgcaaggcatgatgcgggatatggctcgaagccaggcagacaggctggccgcaattcaacccgcggaccttaccaactatttggagatggctacccagatggatatgcggactacgaggatgctgctggggctcctcaacatattgcgcatccagaatgcggcgctcaggtacgagtatcttctaatgcccacggagctcacaacatggccactgggtatggataccgtgggtgacttgctcatcgcgcaggagaatgctgcactgataggattaatgcagctagggccctcatctgatttcacgagcaggcatgtggtgaaagacatacctgtgaacttgctgctcgatggcgaggattgggagtttgagattcctgtgcaagctggcatgtccagcttcccttccagctggtctcgcgtccgtattcggcacctggagatgcactttgtgaaggaggccagcggtattggtggtgagattatccaccagcctaccacccagactgggaccgtttacatccttctgcagggttccactatcttccatgaccgcagaagagaccaggtgttgccttttcaggccgctgctccgctcaactaccattacgcgtaccgcctcgacaccggcgactccactctcacaaacgaaccctctgaacagtttgccaacaagttcatgcagatgacacccttcacccgttggaggcttcgtctgtctgcgtccgcaaaagagaatgcaggattagcctttcccacggctacagcacttgactccactacccagattgtcatcactttccatgttacggccatcagacaaattgactggcggcacgacgaagag

SEQ ID NO: 387 - DNA, 2601 bp, Artificial Sequence
  Synthetic
atggctctcgtggattacggcaagcttttcgaggatctgaaccagataagcatgggtgtactggatcgggtagagttttcagaggtgatggtgatccacaggatgtatgtgaggctagctgatctgaatgtggggcagctcgagggagccgagaaagtgaggcacttgtatattttttgcgacgttatcgagctaccagtcgtggaatggcggtggccgccgcaaataccaggatcggtgacggtgatcatattgtgtcgtcttcttcaatggccaactgatgggaggcagtcggacaccgagctccacctgacattcatgaagttgcatgccatacaacgagaggaaaatcggtgggagataaccgcagcagatggcatgaactggggagtttacatacacgcagaggaagtacaggttggcgtgctgacaatgtcatggtcttcggtacttagagtttcggcacttcgctctgttataacctccggctttcgcgccgttagtgtgtttgaggtaccgggaagtgtaaggtccacccttggagctactttaaggcccgatcacgccttatatagtacaactatgcaagccacacccaacgcatcgcatattagtgcttttaaccttcgcatagtttccccgtcggcatatcgtgtttgtcctctccaaaatgacacagatacctacttaggtattccagcagacgtggcggcagttcttccagtagacgtggtgactgatcctaacatcttgctgggcatgcagacaacggtacacattgcggagctagtcaaggcatgtcatccgtcacccgatgttgtgagcgctgtaggggagcacctgaactggctcaacaaactcttactcccacttaaggaatcgactcagttgcaaggaagcgagtcgtacaaggagtgccttgcactcttgggtcgtgttcacgctgcgatgaagatggtgagaattggcttagtagtgccccagctgcaatacagaatgtacggtagcctcatcaaccaaatggcccaagtagcacaaaactacgaccgagaattcaagcaattcaaattattcatcatccaaaatcaaatccttggcagctatttgctgcagcagaacagggcatttgctgagagggagctgcagatggagagctttcatgctgctgtcatttctcaaagaagggaggagttggacaatacattcgcaaagatggaccgattgagcgggcaaatggaggcagagagtagtgcaatggagcaagccaaaaaggaaatggacgaaggattgaggcagttccagaataggcaagttgcgaacgccctctttgccgttcttagcgctgtagctcagattgggcttgcattccttacggctggtgcaacggctcctggagctgtggcgtcggcggggcaagctgtgagcatagcaggtcaggcggcgcaaggtctgcgaagggtggtggaaattctagagcagctggaggctgtgatggaggttgtggctgctgtgaaggacctcgtggattcattggaacaggtaggtcagattgtggacgcaccggtgatgccggaattgccctcagaggcggactggtccatttttgtgaacgaggtggaggccgtggcagagggcatgccaacggaagtctcggaggttccggtgtggatcggcaagtgcaagaatgtggctgcactgggtcgggagatgagcatcacggcagtacagatgtcggagctgcagtatgacatctgggtgcaaggcatgatgcgggatatggctcgaagccaggcagacaggctggccgcaattcaacccgcggaccttaccaactatttggagatggctacccagatggatatgcggactacgaggatgctgctggggctcctcaacatattgcgcatccagaatgcggcgctcaggtacgagtatcttctaatgcccacggagctcacaacatggccactgggtatggataccgtgggtgacttgctcatcgcgcaggagaatgctgcactgataggattaatgcagctagggccctcatctgatttcacgagcaggcatgtggtgaaagacatacctgtgaacttgctgctcgatggcgaggattgggagtttgagattcctgtgcaagctggcatgtccagcttcccttccagctggtctcgcgtccgtattcggcacctggagatgcactttgtgaaggaggccagcggtattggtggtgagattatccaccagcctaccacccagactgggaccgtttacatccttctgcagggttccactatcttccatgaccgcagaagagaccaggtgttgccttttcaggccgctgctccgctcaactaccattacgcgtaccgcctcgacaccggcgactccactctcacaaacgaaccctctgaacagtttgccaacaagttcatgcagatgacacccttcacccgttggaggcttcgtctgtctgcgtccgcaaaagagaatgcaggattagcctttcccacggctacagcacttgactccactacccagattgtcatcactttccatgttacggccatcagacaaattgactggcggcacgacgaagag

SEQ ID NO: 388 - DNA, 2601 bp, Artificial Sequence
  Synthetic
atggctctcgtggattacggcaagcttttcgaggatctgaaccagataagcatgggtgtactggatcgggtagagttttcagaggtgatggtgatccacaggatgtatgtgaggctagctgatctgaatgtggggcagctcgagggagccgagaaagtgaggcacttgtatatttttagcgacgttgtcgagctaccagtcgtggaatggcggtggccgccgcaaataccaggatcggtgacggtgatcatattgtgtcgtcttcttcaatggccaactgatgggaggcagtcggacaccgagctccacctgacattcatgaagttgcatgccatacaacgagaggaaaatcggtgggagataaccgcagcagatggcatgaactggggagtttacatacacgcagaggaagtacaggttggcgtgctgacaatgtcatggtcttcggtacttagagtttcggcacttcgctctgttataacctccggctttcgcgccgttagtgtgtttgaggtaccgggaagtgtaaggtccacccttggagctactttaaggcccgatcacgccttatatagtacaactatgcaagccacacccaacgcatcgcatattagtgcttttaaccttcgcatagtttccccgtcggcatatcgtgtttgtcctctccaaaatgacacagatacctacttaggtattccagcagacgtggcggcagttcttccagtagacgtggtgactgatcctaacatcttgctgggcatgcagacaacggtacacattgcggagctagtcaaggcatgtcatccgtcacccgatgttgtgagcgctgtaggggagcacctgaactggctcaacaaactcttactcccacttaaggaatcgactcagttgcaaggaagcgagtcgtacaaggagtgccttgcactcttgggtcgtgttcacgctgcgatgaagatggtgagaattggcttagtagtgccccagctgcaatacagaatgtacggtagcctcatcaaccaaatggcccaagtagcacaaaactacgaccgagaattcaagcaattcaaattattcatcatccaaaatcaaatccttggcagctatttgctgcagcagaacagggcatttgctgagagggagctgcagatggagagctttcatgctgctgtcatttctcaaagaagggaggagttggacaatacattcgcaaagatggaccgattgagcgggcaaatggaggcagagagtagtgcaatggagcaagccaaaaaggaaatggacgaaggattgaggcagttccagaataggcaagttgcgaacgccctctttgccgttcttagcgctgtagctcagattgggcttgcattccttacggctggtgcaacggctcctggagctgtggcgtcggcggggcaagctgtgagcatagcaggtcaggcggcgcaaggtctgcgaagggtggtggaaattctagagcagctggaggctgtgatggaggttgtggctgctgtgaaggacctcgtggattcattggaacaggtaggtcagattgtggacgcaccggtgatgccggaattgccctcagaggcggactggtccatttttgtgaacgaggtggaggccgtggcagagggcatgccaacggaagtctcggaggttccggtgtggatggtcaagtgcaagaatgtggctgcactgggtcgggagatgagcatcacggcagtacagatgtcggagctgcagtatgacatctgggtgcaaggcatgatgcgggatatggctcgaagccaggcagacaggctggccgcaattcaacccgcggaccttaccaactatttggagatggctacccagatggatatgcggactacgaggatgctgctggggctcctcaacatattgcgcatccagaatgcggcgctcaggtacgagtatcttctaatgcccacggagctcacaacatggccactgggtatggataccgtgggtgacttgctcatcgcgcaggagaatgctgcactgataggattaatgcagctagggccctcatctgatttcacgagcaggcatgtggtgaaagacatacctgtgaacttgctgctcgatggcgaggattgggagtttgagattcctgtgcaagctggcatgtccagcttcccttccagctggtctcgcgtccgtattcggcacctggagatgcactttgtgaaggaggccagcggtattggtggtgagattatccaccagcctaccacccagactgggaccgtttacatccttctgcagggttccactatcttccatgaccgcagaagagaccaggtgttgccttttcaggccgctgctccgctcaactaccattacgcgtaccgcctcgacaccggcgactccactctcacaaacgaaccctctgaacagtttgccaacaagttcatgcagatgacacccttcacccgttggaggcttcgtctgtctgcgtccgcaaaagagaatgcaggattagcctttcccacggctacagcacttgactccactacccagattgtcatcactttccatgttacggccatcagacaaattgactggcggcacgacgaagag

SEQ ID NO: 389 - DNA, 2601 bp, Artificial Sequence
  Synthetic
atggctctcgtggattacggcaagcttttcgaggatctgaaccagataagcatgggtgtactggatcgggtagagttttcagaggtgatggtgatccacaggatgtatgtgaggctagctgatctgaatgtggggcagctcgagggagccgagaaagtgaggcacttgtatatttttagcgacgttgtcgagctaccagtcgtggaatggcggtggccgccgcaaataccaggatcggtgacggtgatcatattgtgtcgtcttcttcaatggccaactgatgggaggcagtcggacaccgagctccacctgacattcatgaagttgcatgccatacaacgagaggaaaatcggtgggagataaccgcagcagatggcatgaactggggagtttacatacacgcagaggaagtacaggttggcgtgctgacaatgtcatggtcttcggtacttagagtttcggcacttcgctctgttataacctccggctttcgcgccgttagtgtgtttgaggtaccgggaagtgtaaggtccacccttggagctactttaaggcccgatcacgccttatatagtacaactatgcaagccacacccaacgcatcgcatattagtgcttttaaccttcgcatagtttccccgtcggcatatcgtgtttgtcctctccaaaatgacacagatacctacttaggtattccagcagacgtggcggcagttcttccagtagacgtggtgactgatcctaacatcttgctgggcatgcagacaacggtacacattgcggagctagtcaaggcatgtcatccgtcacccgatgttgtgagcgctgtaggggagcacctgaactggctcaacaaactcttactcccacttaaggaatcgactcagttgcaaggaagcgagtcgtacaaggagtgccttgcactcttgggtcgtgttcacgctgcgatgaagatggtgagaattggcttagtagtgccccagctgcaatacagaatgtacggtagcctcatcaaccaaatggcccaagtagcacaaaactacgaccgagaattcaagcaattcaaattattcatcatccaaaatcaaatccttggcagctatttgctgcagcagaacagggcatttgctgagagggagctgcagatggagagctttcatgctgctgtcatttctcaaagaagggaggagttggacaatacattcgcaaagatggaccgattgagcgggcaaatggaggcagagagtagtgcaatggagcaagccaaaaaggaaatggacgaaggattgaggcagttccagaataggcaagttgcgaacgccctctttgccgttcttagcgctgtagctcagattgggcttgcattccttacggctggtgcaacggctcctggagctgtggcgtcggcggggcaagctgtgagcatagcaggtcaggcggcgcaaggtctgcgaagggtggtggaaattctagagcagctggaggctgtgatggaggttgtggctgctgtgaatgacctcgtggattcattggaacaggtaggtcagattgtggacgcaccggtgatgccggaattgccctcagaggcggactggtccatttttgtgaacgaggtggaggccgtggcagagggcatgccaacggaagtctcggaggttccggtgtggaggggcaagtgcaagagcgtggctgcactgggtcgggagatgagcatcacggcagtacagatgtcggagctgcagtatgacatctgggtgcaaggcatgatgcgggatatggctcgaagccaggcagacaggctggccgcaattcaacccgcggaccttaccaactatttggagatggctacccagatggatatgcggactacgaggatgctgctggggctcctcaacatattgcgcatccagaatgcggcgctcaggtacgagtatcttctaatgcccacggagctcacaacatggccactgggtatggataccgtgggtgacttgctcatcgcgcaggagaatgctgcactgataggattaatgcagctagggccctcatctgatttcacgagcaggcatgtggtgaaagacatacctgtgaacttgctgctcgatggcgaggattgggagtttgagattcctgtgcaagctggcatgtccagcttcccttccagctggtctcgcgtccgtattcggcacctggagatgcactttgtgaaggaggccagcggtattggtggtgagattatccaccagcctaccacccagactgggaccgtttacatccttctgcagggttccactatcttccatgaccgcagaagagaccaggtgttgccttttcaggccgctgctccgctcaactaccattacgcgtaccgcctcgacaccggcgactccactctcacaaacgaaccctctgaacagtttgccaacaagttcatgcagatgacacccttcacccgttggaggcttcgtctgtctgcgtccgcaaaagagaatgcaggattagcctttcccacggctacagcacttgactccactacccagattgtcatcactttccatgttacggccatcagacaaattgactggcggcacgacgaagag

SEQ ID NO: 390 - DNA, 2601 bp, Artificial Sequence
  Synthetic
atggctctcgtggattacggcaagcttttcgaggatctgaaccagataagcatgggtgtactggatcgggtagagttttcagaggtgatggtgatccacaggatgtatgtgaggctagctgatctgaatgtggggcagctcgagggagccgagaaagtgaggcagttgtatgttttttgcgacgttctcgtgctaccagtcgtggaatggcggtggccgccgcaaataccaggatcggtgacggtgatcatattgtgtcgtcttcttcaatggccaactgatgggaggcagtcggacaccgagctccacctgacattcatgaagttgcatgccatacaacgagaggaaaatcggtgggagataaccgcagcagatggcatgaactggggagtttacatacacgcagaggaagtacaggttggcgtgctgacaatgtcatggtcttcggtacttagagtttcggcacttcgctctgttataacctccggctttcgcgccgttagtgtgtttgaggtaccgggaagtgtaaggtccacccttggagctactttaaggcccgatcacgccttatatagtacaactatgcaagccacacccaacgcatcgcatattagtgcttttaaccttcgcatagtttccccgtcggcatatcgtgtttgtcctctccaaaatgacacagatacctacttaggtattccagcagacgtggcggcagttcttccagtagacgtggtgactgatcctaacatcttgctgggcatgcagacaacggtacacattgcggagctagtcaaggcatgtcatccgtcacccgatgttgtgagcgctgtaggggagcacctgaactggctcaacaaactcttactcccacttaaggaatcgactcagttgcaaggaagcgagtcgtacaaggagtgccttgcactcttgggtcgtgttcacgctgcgatgaagatggtgagaattggcttagtagtgccccagctgcaatacagaatgtacggtagcctcatcaaccaaatggcccaagtagcacaaaactacgaccgagaattcaagcaattcaaattattcatcatccaaaatcaaatccttggcagctatttgctgcagcagaacagggcatttgctgagagggagctgcagatggagagctttcatgctgctgtcatttctcaaagaagggaggagttggacaatacattcgcaaagatggaccgattgagcgggcaaatggaggcagagagtagtgcaatggagcaagccaaaaaggaaatggacgaaggattgaggcagttccagaataggcaagttgcgaacgccctctttgccgttcttagcgctgtagctcagattgggcttgcattccttacggctggtgcaacggctcctggagctgtggcgtcggcggggcaagctgtgagcatagcaggtcaggcggcgcaaggtctgcgaagggtggtggaaattctagagcagctggaggctgtgatggaggttgtggctgctgtgaaggacctcgtggattcattggaacaggtaggtcagattgtggacgcaccggtgatgccggaattgccctcagaggcggactggtccatttttgtgaacgaggtggaggccgtggcagagggcatgccaacggaagtctcggaggttccggtgtggcacggcaagtgcaagaatgtggctgcactgggtcgggagatgagcatcacggcagtacagatgtcggagctgcagtatgacatctgggtgcaaggcatgatgcgggatatggctcgaagccaggcagacaggctggccgcaattcaacccgcggaccttaccaactatttggagatggctacccagatggatatgcggactacgaggatgctgctggggctcctcaacatattgcgcatccagaatgcggcgctcaggtacgagtatcttctaatgcccacggagctcacaacatggccactgggtatggataccgtgggtgacttgctcatcgcgcaggagaatgctgcactgataggattaatgcagctagggccctcatctgatttcacgagcaggcatgtggtgaaagacatacctgtgaacttgctgctcgatggcgaggattgggagtttgagattcctgtgcaagctggcatgtccagcttcccttccagctggtctcgcgtccgtattcggcacctggagatgcactttgtgaaggaggccagcggtattggtggtgagattatccaccagcctaccacccagactgggaccgtttacatccttctgcagggttccactatcttccatgaccgcagaagagaccaggtgttgccttttcaggccgctgctccgctcaactaccattacgcgtaccgcctcgacaccggcgactccactctcacaaacgaaccctctgaacagtttgccaacaagttcatgcagatgacacccttcacccgttggaggcttcgtctgtctgcgtccgcaaaagagaatgcaggattagcctttcccacggctacagcacttgactccactacccagattgtcatcactttccatgttacggccatcagacaaattgactggcggcacgacgaagag

SEQ ID NO: 391 - DNA, 2601 bp, Artificial Sequence
  Synthetic
atggctctcgtggattacggcaagcttttcgaggatctgaaccagataagcatgggtgtactggatcgggtagagttttcagaggtgatggtgatccacaggatgtatgtgaggctagctgatctgaatgtggggcagctcgagggagccgagaaagtgaggcagttgtatgttttttgcgacgttctcgtgctaccagtcgtggaatggcggtggccgccgcaaataccaggatcggtgacggtgatcatattgtgtcgtcttcttcaatggccaactgatgggaggcagtcggacaccgagctccacctgacattcatgaagttgcatgccatacaacgagaggaaaatcggtgggagataaccgcagcagatggcatgaactggggagtttacatacacgcagaggaagtacaggttggcgtgctgacaatgtcatggtcttcggtacttagagtttcggcacttcgctctgttataacctccggctttcgcgccgttagtgtgtttgaggtaccgggaagtgtaaggtccacccttggagctactttaaggcccgatcacgccttatatagtacaactatgcaagccacacccaacgcatcgcatattagtgcttttaaccttcgcatagtttccccgtcggcatatcgtgtttgtcctctccaaaatgacacagatacctacttaggtattccagcagacgtggcggcagttcttccagtagacgtggtgactgatcctaacatcttgctgggcatgcagacaacggtacacattgcggagctagtcaaggcatgtcatccgtcacccgatgttgtgagcgctgtaggggagcacctgaactggctcaacaaactcttactcccacttaaggaatcgactcagttgcaaggaagcgagtcgtacaaggagtgccttgcactcttgggtcgtgttcacgctgcgatgaagatggtgagaattggcttagtagtgccccagctgcaatacagaatgtacggtagcctcatcaaccaaatggcccaagtagcacaaaactacgaccgagaattcaagcaattcaaattattcatcatccaaaatcaaatccttggcagctatttgctgcagcagaacagggcatttgctgagagggagctgcagatggagagctttcatgctgctgtcatttctcaaagaagggaggagttggacaatacattcgcaaagatggaccgattgagcgggcaaatggaggcagagagtagtgcaatggagcaagccaaaaaggaaatggacgaaggattgaggcagttccagaataggcaagttgcgaacgccctctttgccgttcttagcgctgtagctcagattgggcttgcattccttacggctggtgcaacggctcctggagctgtggcgtcggcggggcaagctgtgagcatagcaggtcaggcggcgcaaggtctgcgaagggtggtggaaattctagagcagctggaggctgtgatggaggttgtggctgctgtgaaggacctcgtggattcattggaacaggtaggtcagattgtggacgcaccggtgatgccggaattgccctcagaggcggactggtccatttttgtgaacgaggtggaggccgtggcagagggcatgccaacggaagtctcggaggttccggtgtggctgggccggtgcaagaatgtggctgcactgggtcgggagatgagcatcacggcagtacagatgtcggagctgcagtatgacatctgggtgcaaggcatgatgcgggatatggctcgaagccaggcagacaggctggccgcaattcaacccgcggaccttaccaactatttggagatggctacccagatggatatgcggactacgaggatgctgctggggctcctcaacatattgcgcatccagaatgcggcgctcaggtacgagtatcttctaatgcccacggagctcacaacatggccactgggtatggataccgtgggtgacttgctcatcgcgcaggagaatgctgcactgataggattaatgcagctagggccctcatctgatttcacgagcaggcatgtggtgaaagacatacctgtgaacttgctgctcgatggcgaggattgggagtttgagattcctgtgcaagctggcatgtccagcttcccttccagctggtctcgcgtccgtattcggcacctggagatgcactttgtgaaggaggccagcggtattggtggtgagattatccaccagcctaccacccagactgggaccgtttacatccttctgcagggttccactatcttccatgaccgcagaagagaccaggtgttgccttttcaggccgctgctccgctcaactaccattacgcgtaccgcctcgacaccggcgactccactctcacaaacgaaccctctgaacagtttgccaacaagttcatgcagatgacacccttcacccgttggaggcttcgtctgtctgcgtccgcaaaagagaatgcaggattagcctttcccacggctacagcacttgactccactacccagattgtcatcactttccatgttacggccatcagacaaattgactggcggcacgacgaagag

SEQ ID NO: 392 - DNA, 2601 bp, Artificial Sequence
  Synthetic
atagctctcgtggattacggcaagcttttcgaggatctgaaccagataagcatgggtgtactggatcgggtagagttttcagaggtgatggtgatccacaggatgtatgtgaggctagctgatctgaatgtggggcagctcgagggagccgagaaagtgaggcagttgtatgttttttgcgacgttctcgtgctaccagtcgtggaatggcggtggccgccgcaaataccaggatcggtgacggtgatcatattgtgtcgtcttcttcaatggccaactgatgggaggcagtcggacaccgagctccacctgacattcatgaagttgcatgccatacaacgagaggaaaatcggtgggagataaccgcagcagatggcatgaactggggagtttacatacacgcagaggaagtacaggttggcgtgctgacaatgtcatggtcttcggtacttagagtttcggcacttcgctctgttataacctccggctttcgcgccgttagtgtgtttgaggtaccgggaagtgtaaggtccacccttggagctactttaaggcccgatcacgccttatatagtacaactatgcaagccacacccaacgcatcgcatattagtgcttttaaccttcgcatagtttccccgtcggcatatcgtgtttgtcctctccaaaatgacacagatacctacttaggtattccagcagacgtggcggcagttcttccagtagacgtggtgactgatcctaacatcttgctgggcatgcagacaacggtacacattgcggagctagtcaaggcatgtcatccgtcacccgatgttgtgagcgctgtaggggagcacctgaactggctcaacaaactcttactcccacttaaggaatcgactcagttgcaaggaagcgagtcgtacaaggagtgccttgcactcttgggtcgtgttcacgctgcgatgaagatggtgagaattggcttagtagtgccccagctgcaatacagaatgtacggtagcctcatcaaccaaatggcccaagtagcacaaaactacgaccgagaattcaagcaattcaaattattcatcatccaaaatcaaatccttggcagctatttgctgcagcagaacagggcatttgctgagagggagctgcagatggagagctttcatgctgctgtcatttctcaaagaagggaggagttggacaatacattcgcaaagatggaccgattgagcgggcaaatggaggcagagagtagtgcaatggagcaagccaaaaaggaaatggacgaaggattgaggcagttccagaataggcaagttgcgaacgccctctttgccgttcttagcgctgtagctcagattgggcttgcattccttacggctggtgcaacggctcctggagctgtggcgtcggcggggcaagctgtgagcatagcaggtcaggcggcgcaaggtctgcgaagggtggtggaaattctagagcagctggaggctgtgatggaggttgtggctgctgtgaaggacctcgtggattcattggaacaggtaggtcagattgtggacgcaccggtgatgccggaattgccctcagaggcggactggtccatttttgtgaacgaggtggaggccgtggcagagggcatgccaacggaagtctcggaggttccggtgtggaggggcaagtgcaagagcgtggctgcactgggtcgggagatgagcatcacggcagtacagatgtcggagctgcagtatgacatctgggtgcaaggcatgatgcgggatatggctcgaagccaggcagacaggctggccgcaattcaacccgcggaccttaccaactatttggagatggctacccagatggatatgcggactacgaggatgctgctggggctcctcaacatattgcgcatccagaatgcggcgctcaggtacgagtatcttctaatgcccacggagctcacaacatggccactgggtatggataccgtgggtgacttgctcatcgcgcaggagaatgctgcactgataggattaatgcagctagggccctcatctgatttcacgagcaggcatgtggtgaaagacatacctgtgaacttgctgctcgatggcgaggattgggagtttgagattcctgtgcaagctggcatgtccagcttcccttccagctggtctcgcgtccgtattcggcacctggagatgcactttgtgaaggaggccagcggtattggtggtgagattatccaccagcctaccacccagactgggaccgtttacatccttctgcagggttccactatcttccatgaccgcagaagagaccaggtgttgccttttcaggccgctgctccgctcaactaccattacgcgtaccgcctcgacaccggcgactccactctcacaaacgaaccctctgaacagtttgccaacaagttcatgcagatgacacccttcacccgttggaggcttcgtctgtctgcgtccgcaaaagagaatgcaggattagcctttcccacggctacagcacttgactccactacccagattgtcatcactttccatgttacggccatcagacaaattgactggcggcacgacgaagag

SEQ ID NO: 393 - DNA, 2601 bp, Artificial Sequence
  Synthetic
atggctctcgtggattacggcaagcttttcgaggatctgaaccagataagcatgggtgtactggatcgggtagagttttcagaggtgatggtgatccacaggatgtatgtgaggctagctgatctgaatgtggggcagctcgagggagccgagaaagtgaggcggttgtatatttttgccgacattctcgagctaccagtcgtggaatggcggtggccgccgcaaataccaggatcggtgacggtgatcatattgtgtcgtcttcttcaatggccaactgatgggaggcagtcggacaccgagctccacctgacattcatgaagttgcatgccatacaacgagaggaaaatcggtgggagataaccgcagcagatggcatgaactggggagtttacatacacgcagaggaagtacaggttggcgtgctgacaatgtcatggtcttcggtacttagagtttcggcacttcgctctgttataacctccggctttcgcgccgttagtgtgtttgaggtaccgggaagtgtaaggtccacccttggagctactttaaggcccgatcacgccttatatagtacaactatgcaagccacacccaacgcatcgcatattagtgcttttaaccttcgcatagtttccccgtcggcatatcgtgtttgtcctctccaaaatgacacagatacctacttaggtattccagcagacgtggcggcagttcttccagtagacgtggtgactgatcctaacatcttgctgggcatgcagacaacggtacacattgcggagctagtcaaggcatgtcatccgtcacccgatgttgtgagcgctgtaggggagcacctgaactggctcaacaaactcttactcccacttaaggaatcgactcagttgcaaggaagcgagtcgtacaaggagtgccttgcactcttgggtcgtgttcacgctgcgatgaagatggtgagaattggcttagtagtgccccagctgcaatacagaatgtacggtagcctcatcaaccaaatggcccaagtagcacaaaactacgaccgagaattcaagcaattcaaattattcatcatccaaaatcaaatccttggcagctatttgctgcagcagaacagggcatttgctgagagggagctgcagatggagagctttcatgctgctgtcatttctcaaagaagggaggagttggacaatacattcgcaaagatggaccgattgagcgggcaaatggaggcagagagtagtgcaatggagcaagccaaaaaggaaatggacgaaggattgaggcagttccagaataggcaagttgcgaacgccctctttgccgttcttagcgctgtagctcagattgggcttgcattccttacggctggtgcaacggctcctggagctgtggcgtcggcggggcaagctgtgagcatagcaggtcaggcggcgcaaggtctgcgaagggtggtggaaattctagagcagctggaggctgtgatggaggttgtggctgctgtgaaggacctcgtggattcattggaacaggtaggtcagattgtggacgcaccggtgatgccggaattgccctcagaggcggactggtccatttttgtgaacgaggtggaggccgtggcagagggcatgccaacggaagtctcggaggttccggtgtggatggtcaagtgcaagaatgtggctgcactgggtcgggagatgagcatcacggcagtacagatgtcggagctgcagtatgacatctgggtgcaaggcatgatgcgggatatggctcgaagccaggcagacaggctggccgcaattcaacccgcggaccttaccaactatttggagatggctacccagatggatatgcggactacgaggatgctgctggggctcctcaacatattgcgcatccagaatgcggcgctcaggtacgagtatcttctaatgcccacggagctcacaacatggccactgggtatggataccgtgggtgacttgctcatcgcgcaggagaatgctgcactgataggattaatgcagctagggccctcatctgatttcacgagcaggcatgtggtgaaagacatacctgtgaacttgctgctcgatggcgaggattgggagtttgagattcctgtgcaagctggcatgtccagcttcccttccagctggtctcgcgtccgtattcggcacctggagatgcactttgtgaaggaggccagcggtattggtggtgagattatccaccagcctaccacccagactgggaccgtttacatccttctgcagggttccactatcttccatgaccgcagaagagaccaggtgttgccttttcaggccgctgctccgctcaactaccattacgcgtaccgcctcgacaccggcgactccactctcacaaacgaaccctctgaacagtttgccaacaagttcatgcagatgacacccttcacccgttggaggcttcgtctgtctgcgtccgcaaaagagaatgcaggattagcctttcccacggctacagcacttgactccactacccagattgtcatcactttccatgttacggccatcagacaaattgactggcggcacgacgaagag

SEQ ID NO: 394 - DNA, 2601 bp, Artificial Sequence
  Synthetic
atggctctcgtggattacggcaagcttttcgaggatctgaaccagataagcatgggtgtactggatcgggtagagttttcagaggtgatggtgatccacaggatgtatgtgaggctagctgatctgaatgtggggcagctcgagggagccgagaaagtgaggcgcttgtatgttttttgcgacgttgtcgtgctaccagtcgtggaatggcggtggccgccgcaaataccaggatcggtgacggtgatcatattgtgtcgtcttcttcaatggccaactgatgggaggcagtcggacaccgagctccacctgacattcatgaagttgcatgccatacaacgagaggaaaatcggtgggagataaccgcagcagatggcatgaactggggagtttacatacacgcagaggaagtacaggttggcgtgctgacaatgtcatggtcttcggtacttagagtttcggcacttcgctctgttataacctccggctttcgcgccgttagtgtgtttgaggtaccgggaagtgtaaggtccacccttggagctactttaaggcccgatcacgccttatatagtacaactatgcaagccacacccaacgcatcgcatattagtgcttttaaccttcgcatagtttccccgtcggcatatcgtgtttgtcctctccaaaatgacacagatacctacttaggtattccagcagacgtggcggcagttcttccagtagacgtggtgactgatcctaacatcttgctgggcatgcagacaacggtacacattgcggagctagtcaaggcatgtcatccgtcacccgatgttgtgagcgctgtaggggagcacctgaactggctcaacaaactcttactcccacttaaggaatcgactcagttgcaaggaagcgagtcgtacaaggagtgccttgcactcttgggtcgtgttcacgctgcgatgaagatggtgagaattggcttagtagtgccccagctgcaatacagaatgtacggtagcctcatcaaccaaatggcccaagtagcacaaaactacgaccgagaattcaagcaattcaaattattcatcatccaaaatcaaatccttggcagctatttgctgcagcagaacagggcatttgctgagagggagctgcagatggagagctttcatgctgctgtcatttctcaaagaagggaggagttggacaatacattcgcaaagatggaccgattgagcgggcaaatggaggcagagagtagtgcaatggagcaagccaaaaaggaaatggacgaaggattgaggcagttccagaataggcaagttgcgaacgccctctttgccgttcttagcgctgtagctcagattgggcttgcattccttacggctggtgcaacggctcctggagctgtggcgtcggcggggcaagctgtgagcatagcaggtcaggcggcgcaaggtctgcgaagggtggtggaaattctagagcagctggaggctgtgatggaggttgtggctgctgtgaaggacctcgtggattcattggaacaggtaggtcagattgtggacgcaccggtgatgccggaattgccctcagaggcggactggtccatttttgtgaacgaggtggaggccgtggcagagggcatgccaacggaagtctcggaggttccggtgtggagggccaggtgcaagaatgtggctgcactgggtcgggagatgagcatcacggcagtacagatgtcggagctgcagtatgacatctgggtgcaaggcatgatgcgggatatggctcgaagccaggcagacaggctggccgcaattcaacccgcggaccttaccaactatttggagatggctacccagatggatatgcggactacgaggatgctgctggggctcctcaacatattgcgcatccagaatgcggcgctcaggtacgagtatcttctaatgcccacggagctcacaacatggccactgggtatggataccgtgggtgacttgctcatcgcgcaggagaatgctgcactgataggattaatgcagctagggccctcatctgatttcacgagcaggcatgtggtgaaagacatacctgtgaacttgctgctcgatggcgaggattgggagtttgagattcctgtgcaagctggcatgtccagcttcccttccagctggtctcgcgtccgtattcggcacctggagatgcactttgtgaaggaggccagcggtattggtggtgagattatccaccagcctaccacccagactgggaccgtttacatccttctgcagggttccactatcttccatgaccgcagaagagaccaggtgttgccttttcaggccgctgctccgctcaactaccattacgcgtaccgcctcgacaccggcgactccactctcacaaacgaaccctctgaacagtttgccaacaagttcatgcagatgacacccttcacccgttggaggcttcgtctgtctgcgtccgcaaaagagaatgcaggattagcctttcccacggctacagcacttgactccactacccagattgtcatcactttccatgttacggccatcagacaaattgactggcggcacgacgaagag

SEQ ID NO: 395 - DNA, 2601 bp, Artificial Sequence
  Synthetic
atggctctcgtggattacggcaagcttttcgaggatctgaaccagataagcatgggtgtactggatcgggtagagttttcagaggtgatggtgatccacaggatgtatgtgaggctagctgatctgaatgtggggcagctcgagggagccgagaaagtgaggcggttgtatgtttttaccgacgttctcgtgctaccagtcgtggaatggcggtggccgccgcaaataccaggatcggtgacggtgatcatattgtgtcgtcttcttcaatggccaactgatgggaggcagtcggacaccgagctccacctgacattcatgaagttgcatgccatacaacgagaggaaaatcggtgggagataaccgcagcagatggcatgaactggggagtttacatacacgcagaggaagtacaggttggcgtgctgacaatgtcatggtcttcggtacttagagtttcggcacttcgctctgttataacctccggctttcgcgccgttagtgtgtttgaggtaccgggaagtgtaaggtccacccttggagctactttaaggcccgatcacgccttatatagtacaactatgcaagccacacccaacgcatcgcatattagtgcttttaaccttcgcatagtttccccgtcggcatatcgtgtttgtcctctccaaaatgacacagatacctacttaggtattccagcagacgtggcggcagttcttccagtagacgtggtgactgatcctaacatcttgctgggcatgcagacaacggtacacattgcggagctagtcaaggcatgtcatccgtcacccgatgttgtgagcgctgtaggggagcacctgaactggctcaacaaactcttactcccacttaaggaatcgactcagttgcaaggaagcgagtcgtacaaggagtgccttgcactcttgggtcgtgttcacgctgcgatgaagatggtgagaattggcttagtagtgccccagctgcaatacagaatgtacggtagcctcatcaaccaaatggcccaagtagcacaaaactacgaccgagaattcaagcaattcaaattattcatcatccaaaatcaaatccttggcagctatttgctgcagcagaacagggcatttgctgagagggagctgcagatggagagctttcatgctgctgtcatttctcaaagaagggaggagttggacaatacattcgcaaagatggaccgattgagcgggcaaatggaggcagagagtagtgcaatggagcaagccaaaaaggaaatggacgaaggattgaggcagttccagaataggcaagttgcgaacgccctctttgccgttcttagcgctgtagctcagattgggcttgcattccttacggctggtgcaacggctcctggagctgtggcgtcggcggggcaagctgtgagcatagcaggtcaggcggcgcaaggtctgcgaagggtggtggaaattctagagcagctggaggctgtgatggaggttgtggctgctgtgaaggacctcgtggattcattggaacaggtaggtcagattgtggacgcaccggtgatgccggaattgccctcagaggcggactggtccatttttgtgaacgaggtggaggccgtggcagagggcatgccaacggaagtctcggaggttccggtgtggatcggcaagtgcaagaatgtggctgcactgggtcgggagatgagcatcacggcagtacagatgtcggagctgcagtatgacatctgggtgcaaggcatgatgcgggatatggctcgaagccaggcagacaggctggccgcaattcaacccgcggaccttaccaactatttggagatggctacccagatggatatgcggactacgaggatgctgctggggctcctcaacatattgcgcatccagaatgcggcgctcaggtacgagtatcttctaatgcccacggagctcacaacatggccactgggtatggataccgtgggtgacttgctcatcgcgcaggagaatgctgcactgataggattaatgcagctagggccctcatctgatttcacgagcaggcatgtggtgaaagacatacctgtgaacttgctgctcgatggcgaggattgggagtttgagattcctgtgcaagctggcatgtccagcttcccttccagctggtctcgcgtccgtattcggcacctggagatgcactttgtgaaggaggccagcggtattggtggtgagattatccaccagcctaccacccagactgggaccgtttacatccttctgcagggttccactatcttccatgaccgcagaagagaccaggtgttgccttttcaggccgctgctccgctcaactaccattacgcgtaccgcctcgacaccggcgactccactctcacaaacgaaccctctgaacagtttgccaacaagttcatgcagatgacacccttcacccgttggaggcttcgtctgtctgcgtccgcaaaagagaatgcaggattagcctttcccacggctacagcacttgactccactacccagattgtcatcactttccatgttacggccatcagacaaattgactggcggcacgacgaagag

SEQ ID NO: 396 - DNA, 2601 bp, Artificial Sequence
  Synthetic
atggctctcgtggattacggcaagcttttcgaggatctgaaccagataagcatgggtgtactggatcgggtagagttttcagaggtgatggtgatccacaggatgtatgtgaggctagctgatctgaatgtggggcagctcgagggagccgagaaagtgaggcggttgtatgtttttaccgacgttctcgtgctaccagtcgtggaatggcggtggccgccgcaaataccaggatcggtgacggtgatcatattgtgtcgtcttcttcaatggccaactgatgggaggcagtcggacaccgagctccacctgacattcatgaagttgcatgccatacaacgagaggaaaatcggtgggagataaccgcagcagatggcatgaactggggagtttacatacacgcagaggaagtacaggttggcgtgctgacaatgtcatggtcttcggtacttagagtttcggcacttcgctctgttataacctccggctttcgcgccgttagtgtgtttgaggtaccgggaagtgtaaggtccacccttggagctactttaaggcccgatcacgccttatatagtacaactatgcaagccacacccaacgcatcgcatattagtgcttttaaccttcgcatagtttccccgtcggcatatcgtgtttgtcctctccaaaatgacacagatacctacttaggtattccagcagacgtggcggcagttcttccagtagacgtggtgactgatcctaacatcttgctgggcatgcagacaacggtacacattgcggagctagtcaaggcatgtcatccgtcacccgatgttgtgagcgctgtaggggagcacctgaactggctcaacaaactcttactcccacttaaggaatcgactcagttgcaaggaagcgagtcgtacaaggagtgccttgcactcttgggtcgtgttcacgctgcgatgaagatggtgagaattggcttagtagtgccccagctgcaatacagaatgtacggtagcctcatcaaccaaatggcccaagtagcacaaaactacgaccgagaattcaagcaattcaaattattcatcatccaaaatcaaatccttggcagctatttgctgcagcagaacagggcatttgctgagagggagctgcagatggagagctttcatgctgctgtcatttctcaaagaagggaggagttggacaatacattcgcaaagatggaccgattgagcgggcaaatggaggcagagagtagtgcaatggagcaagccaaaaaggaaatggacgaaggattgaggcagttccagaataggcaagttgcgaacgccctctttgccgttcttagcgctgtagctcagattgggcttgcattccttacggctggtgcaacggctcctggagctgtggcgtcggcggggcaagctgtgagcatagcaggtcaggcggcgcaaggtctgcgaagggtggtggaaattctagagcagctggaggctgtgatggaggttgtggctgctgtgaaggacctcgtggattcattggaacaggtaggtcagattgtggacgcaccggtgatgccggaattgccctcagaggcggactggtccatttttgtgaacgaggtggaggccgtggcagagggcatgccaacggaagtctcggaggttccggtgtggagggccaggtgcaagaatgtggctgcactgggtcgggagatgagcatcacggcagtacagatgtcggagctgcagtatgacatctgggtgcaaggcatgatgcgggatatggctcgaagccaggcagacaggctggccgcaattcaacccgcggaccttaccaactatttggagatggctacccagatggatatgcggactacgaggatgctgctggggctcctcaacatattgcgcatccagaatgcggcgctcaggtacgagtatcttctaatgcccacggagctcacaacatggccactgggtatggataccgtgggtgacttgctcatcgcgcaggagaatgctgcactgataggattaatgcagctagggccctcatctgatttcacgagcaggcatgtggtgaaagacatacctgtgaacttgctgctcgatggcgaggattgggagtttgagattcctgtgcaagctggcatgtccagcttcccttccagctggtctcgcgtccgtattcggcacctggagatgcactttgtgaaggaggccagcggtattggtggtgagattatccaccagcctaccacccagactgggaccgtttacatccttctgcagggttccactatcttccatgaccgcagaagagaccaggtgttgccttttcaggccgctgctccgctcaactaccattacgcgtaccgcctcgacaccggcgactccactctcacaaacgaaccctctgaacagtttgccaacaagttcatgcagatgacacccttcacccgttggaggcttcgtctgtctgcgtccgcaaaagagaatgcaggattagcctttcccacggctacagcacttgactccactacccagattgtcatcactttccatgttacggccatcagacaaattgactggcggcacgacgaagag

SEQ ID NO: 397 - DNA, 2601 bp, Artificial Sequence
  Synthetic
atggctctcgtggattacggcaagcttttcgaggatctgaaccagataagcatgggtgtactggatcgggtagagttttcagaggtgatggtgatccacaggatgtatgtgaggctagctgatctgaatgtggggcagctcgagggagccgagaaagtgaggcggttgtatgtttttaccgacgttctcgtgctaccagtcgtggaatggcggtggccgccgcaaataccaggatcggtgacggtgatcatattgtgtcgtcttcttcaatggccaactgatgggaggcagtcggacaccgagctccacctgacattcatgaagttgcatgccatacaacgagaggaaaatcggtgggagataaccgcagcagatggcatgaactggggagtttacatacacgcagaggaagtacaggttggcgtgctgacaatgtcatggtcttcggtacttagagtttcggcacttcgctctgttataacctccggctttcgcgccgttagtgtgtttgaggtaccgggaagtgtaaggtccacccttggagctactttaaggcccgatcacgccttatatagtacaactatgcaagccacacccaacgcatcgcatattagtgcttttaaccttcgcatagtttccccgtcggcatatcgtgtttgtcctctccaaaatgacacagatacctacttaggtattccagcagacgtggcggcagttcttccagtagacgtggtgactgatcctaacatcttgctgggcatgcagacaacggtacacattgcggagctagtcaaggcatgtcatccgtcacccgatgttgtgagcgctgtaggggagcacctgaactggctcaacaaactcttactcccacttaaggaatcgactcagttgcaaggaagcgagtcgtacaaggagtgccttgcactcttgggtcgtgttcacgctgcgatgaagatggtgagaattggcttagtagtgccccagctgcaatacagaatgtacggtagcctcatcaaccaaatggcccaagtagcacaaaactacgaccgagaattcaagcaattcaaattattcatcatccaaaatcaaatccttggcagctatttgctgcagcagaacagggcatttgctgagagggagctgcagatggagagctttcatgctgctgtcatttctcaaagaagggaggagttggacaatacattcgcaaagatggaccgattgagcgggcaaatggaggcagagagtagtgcaatggagcaagccaaaaaggaaatggacgaaggattgaggcagttccagaataggcaagttgcgaacgccctctttgccgttcttagcgctgtagctcagattgggcttgcattccttacggctggtgcaacggctcctggagctgtggcgtcggcggggcaagctgtgagcatagcaggtcaggcggcgcaaggtctgcgaagggtggtggaaattctagagcagctggaggctgtgatggaggttgtggctgctgtgaaggacctcgtggattcattggaacaggtaggtcagattgtggacgcaccggtgatgccggaattgccctcagaggcggactggtccatttttgtgaacgaggtggaggccgtggcagagggcatgccaacggaagtctcggaggttccggtgtggacggtcaagtgcaagaatgtggctgcactgggtcgggagatgagcatcacggcagtacagatgtcggagctgcagtatgacatctgggtgcaaggcatgatgcgggatatggctcgaagccaggcagacaggctggccgcaattcaacccgcggaccttaccaactatttggagatggctacccagatggatatgcggactacgaggatgctgctggggctcctcaacatattgcgcatccagaatgcggcgctcaggtacgagtatcttctaatgcccacggagctcacaacatggccactgggtatggataccgtgggtgacttgctcatcgcgcaggagaatgctgcactgataggattaatgcagctagggccctcatctgatttcacgagcaggcatgtggtgaaagacatacctgtgaacttgctgctcgatggcgaggattgggagtttgagattcctgtgcaagctggcatgtccagcttcccttccagctggtctcgcgtccgtattcggcacctggagatgcactttgtgaaggaggccagcggtattggtggtgagattatccaccagcctaccacccagactgggaccgtttacatccttctgcagggttccactatcttccatgaccgcagaagagaccaggtgttgccttttcaggccgctgctccgctcaactaccattacgcgtaccgcctcgacaccggcgactccactctcacaaacgaaccctctgaacagtttgccaacaagttcatgcagatgacacccttcacccgttggaggcttcgtctgtctgcgtccgcaaaagagaatgcaggattagcctttcccacggctacagcacttgactccactacccagattgtcatcactttccatgttacggccatcagacaaattgactggcggcacgacgaagag

SEQ ID NO: 398 - protein, 867 aa, Artificial Sequence
  Synthetic
MALVDYGKLFEDLNQISMGVLDRVEFSEVMVIHRMYVRLADLNVGQLEGAEKVKHLYIFTDVLELPVVEWRWPPQIPGSVTVIILCRLLQWPTDGRQSDTELHLTFMKLHAIQREENRWEITAADGMNWGVYIHAEEVQVGVLTMSWSSVLRVSALRSVITSGFRAVSVFEVPGSVRSTLGATLRPDHALYSTTMQATPNASHISAFNLRIVSPSAYRVCPLQNDTDTYLGIPADVAAVLPVDVVTDPNILLGMQTTVHIAELVKACHPSPDVVSAVGEHLNWLNKLLLPLKESTQLQGSESYKECLALLGRVHAAMKMVRIGLVVPQLQYRMYGSLINQMAQVAQNYDREFKQFKLFIIQNQILGSYLLQQNRAFAERELQMESFHAAVISQRREELDNTFAKMDRLSGQMEAESSAMEQAKKEMDEGLRQFQNRQVANALFAVLSAVAQIGLAFLTAGATAPGAVASAGQAVSIAGQAAQGLRRVVEILEQLEAVMEVVAAVKDLVDSLEQVGQIVDAPVMPELPSEADWFIFVNEVEAVAEGMPTEVSEVPVWHGKCKNVAALGREMSITAVQMSELQYDIWVQGMMRDMARSQADRLAAIQPADLTNYLEMATQMDMRTTRMLLGLLNILRIQNAALRYEYLLMPTELTTWPLGMDTVGDLLIAQENAALIGLMQLGPSSDFTSRHVVKDIPVNLLLDGEDWEFEIPVQAGMSSFPSSWSRVRIRHLEMHFVKEASGIGGEIIHQPTTQTGTVYILLQGSTIFHDRRRDQVLPFQAAAPLNYHYAYRLDTGDSTLTNEPSEQFANKFMQMTPFTRWRLRLSASAKENAGLAFPTATALDSTTQIVITFHVTAIRQIDWRHDEE

SEQ ID NO: 399 - protein, 867 aa, Artificial Sequence
  Synthetic
MALVDYGKLFEDLNQISMGVLDRVEFSEVMVIHRMYVRLADLNVGQLEGAEKVKHLYIFTDVLELPVVEWRWPPQIPGSVTVIILCRLLQWPTDGRQSDTELHLTFMKLHAIQREENRWEITAADGMNWGVYIHAEEVQVGVLTMSWSSVLRVSALRSVITSGFRAVSVFEVPGSVRSTLGATLRPDHALYSTTMQATPNASHISAFNLRIVSPSAYRVCPLQNDTDTYLGIPADVAAVLPVDVVTDPNILLGMQTTVHIAELVKACHPSPDVVSAVGEHLNWLNKLLLPLKESTQLQGSESYKECLALLGRVHAAMKMVRIGLVVPQLQYRMYGSLINQMAQVAQNYDREFKQFKLFIIQNQILGSYLLQQNRAFAERELQMESFHAAVISQRREELDNTFAKMDRLSGQMEAESSAMEQAKKEMDEGLRQFQNRQVANALFAVLSAVAQIGLAFLTAGATAPGAVASAGQAVSIAGQAAQGLRRVVEILEQLEAVMEVVAAVKDLVDSLEQVGQIVDAPVMPELPSEADWSIFVNEVEAVAEGMPTEVSEVPVWLARCKNVAALGREMSITAVQMSELQYDIWVQGMMRDMARSQADRLAAIQPADLTNYLEMATQMDMRTTRMLLGLLNILRIQNAALRYEYLLMPTELTTWPLGMDTVGDLLIAQENAALIGLMQLGPSSDFTSRHVVKDIPVNLLLDGEDWEFEIPVQAGMSSFPSSWSRVRIRHLEMHFVKEASGIGGEIIHQPTTQTGTVYILLQGSTIFHDRRRDQVLPFQAAAPLNYHYAYRLDTGDSTLTNEPSEQFANKFMQMTPFTRWRLRLSASAKENAGLAFPTATALDSTTQIVITFHVTAIRQIDWRHDEE

SEQ ID NO: 400 - protein, 867 aa, Artificial Sequence
  Synthetic
MALVDYGKLFEDLNQISMGVLDRVEFSEVMVIHRMYVRLADLNVGQLEGAEKVKHLYIFTDVLELPVVEWRWPPQIPGSVTVIILCRLLQWPTDGRQSDTELHLTFMKLHAIQREENRWEITAADGMNWGVYIHAEEVQVGVLTMSWSSVLRVSALRSVITSGFRAVSVFEVPGSVRSTLGATLRPDHALYSTTMQATPNASHISAFNLRIVSPSAYRVCPLQNDTDTYLGIPADVAAVLPVDVVTDPNILLGMQTTVHIAELVKACHPSPDVVSAVGEHLNWLNKLLLPLKESTQLQGSESYKECLALLGRVHAAMKMVRIGLVVPQLQYRMYGSLINQMAQVAQNYDREFKQFKLFIIQNQILGSYLLQQNRAFAERELQMESFHAAVISQRREELDNTFAKMDRLSGQMEAESSAMEQAKKEMDEGLRQFQNRQVANALFAVLSAVAQIGLAFLTAGATAPGAVASAGQAVSIAGQAAQGLRRVVEILEQLEAVMEVVAAVKDLVDSLEQVGQIVDAPVMPELPSEADWSIFVNEVEAVAEGMPTEVSEVPVWQARCKHVAALGREMSITAVQMSELQYDIWVQGMMRDMARSQADRLAAIQPADLTNYLEMATQMDMRTTRMLLGLLNILRIQNAALRYEYLLMPTELTTWPLGMDTVGDLLIAQENAALIGLMQLGPSSDFTSRHVVKDIPVNLLLDGEDWEFEIPVQAGMSSFPSSWSRVRIRHLEMHFVKEASGIGGEIIHQPTTQTGTVYILLQGSTIFHDRRRDQVLPFQAAAPLNYHYAYRLDTGDSTLTNEPSEQFANKFMQMTPFTRWRLRLSASAKENAGLAFPTATALDSTTQIVITFHVTAIRQIDWRHDEE

SEQ ID NO: 401 - protein, 867 aa, Artificial Sequence
  Synthetic
MALVDYGKLFEDLNQISMGVLDRVEFSEVMVIHRMYVRLADLNVGQLEGAEKVKHLYVFADVIELPVVEWRWPPQIPGSVTVIILCRLLQWPTDGRQSDTELHLTFMKLHAIQREENRWEITAADGMNWGVYIHAEEVQVGVLTMSWSSVLRVSALRSVITSGFRAVSVFEVPGSVRSTLGATLRPDHALYSTTMQATPNASHISAFNLRIVSPSAYRVCPLQNDTDTYLGIPADVAAVLPVDVVTDPNILLGMQTTVHIAELVKACHPSPDVVSAVGEHLNWLNKLLLPLKESTQLQGSESYKECLALLGRVHAAMKMVRIGLVVPQLQYRMYGSLINQMAQVAQNYDREFKQFKLFIIQNQILGSYLLQQNRAFAERELQMESFHAAVISQRREELDNTFAKMDRLSGQMEAESSAMEQAKKEMDEGLRQFQNRQVANALFAVLSAVAQIGLAFLTAGATAPGAVASAGQAVSIAGQAAQGLRRVVEILEQLEAVMEVVAAVKDLVDSLEQVGQIVDAPVMPELPSEADWSIFVNEVEAVAEGMPTEVSEVPVWQARCKHVAALGREMSITAVQMSELQYDIWVQGMMRDMARSQADRLAAIQPADLTNYLEMATQMDMRTTRMLLGLLNILRIQNAALRYEYLLMPTELTTWPLGMDTVGDLLIAQENAALIGLMQLGPSSDFTSRHVVKDIPVNLLLDGEDWEFEIPVQAGMSSFPSSWSRVRIRHLEMHFVKEASGIGGEIIHQPTTQTGTVYILLQGSTIFHDRRRDQVLPFQAAAPLNYHYAYRLDTGDSTLTNEPSEQFANKFMQMTPFTRWRLRLSASAKENAGLAFPTATALDSTTQIVITFHVTAIRQIDWRHDEE

SEQ ID NO: 402 - protein, 867 aa, Artificial Sequence
  Synthetic
MALVDYGKLFEDLNQISMGVLDRVEFSEVMVIHRMYVRLADLNVGQLEGAEKVKHLYVFADVIELPVVEWRWPPQIPGSVTVIILCRLLQWPTDGRQSDTELHLTFMKLHAIQREENRWEITAADGMNWGVYIHAEEVQVGVLTMSWSSVLRVSALRSVITSGFRAVSVFEVPGSVRSTLGATLRPDHALYSTTMQATPNASHISAFNLRIVSPSAYRVCPLQNDTDTYLGIPADVAAVLPVDVVTDPNILLGMQTTVHIAELVKACHPSPDVVSAVGEHLNWLNKLLLPLKESTQLQGSESYKECLALLGRVHAAMKMVRIGLVVPQLQYRMYGSLINQMAQVAQNYDREFKQFKLFIIQNQILGSYLLQQNRAFAERELQMESFHAAVISQRREELDNTFAKMDRLSGQMEAESSAMEQAKKEMDEGLRQFQNRQVANALFAVLSAVAQIGLAFLTAGATAPGAVASAGQAVSIAGQAAQGLRRVVEILEQLEAVMEVVAAVKDLVDSLEQVGQIVDAPVMPELPSEADWSIFVNEVEAVAEGMPTEVSEVPVWRARCKNVAALGREMSITAVQMSELQYDIWVQGMMRDMARSQADRLAAIQPADLTNYLEMATQMDMRTTRMLLGLLNILRIQNAALRYEYLLMPTELTTWPLGMDTVGDLLIAQENAALIGLMQLGPSSDFTSRHVVKDIPVNLLLDGEDWEFEIPVQAGMSSFPSSWSRVRIRHLEMHFVKEASGIGGEIIHQPTTQTGTVYILLQGSTIFHDRRRDQVLPFQAAAPLNYHYAYRLDTGDSTLTNEPSEQFANKFMQMTPFTRWRLRLSASAKENAGLAFPTATALDSTTQIVITFHVTAIRQIDWRHDEE

SEQ ID NO: 403 - protein, 867 aa, Artificial Sequence
  Synthetic
MALVDYGKLFEDLNQISMGVLDRVEFSEVMVIHRMYVRLADLNVGQLEGAEKVKQLYIFCDVLELPVVEWRWPPQIPGSVTVIILCRLLQWPTDGRQSDTELHLTFMKLHAIQREENRWEITAADGMNWGVYIHAEEVQVGVLTMSWSSVLRVSALRSVITSGFRAVSVFEVPGSVRSTLGATLRPDHALYSTTMQATPNASHISAFNLRIVSPSAYRVCPLQNDTDTYLGIPADVAAVLPVDVVTDPNILLGMQTTVHIAELVKACHPSPDVVSAVGEHLNWLNKLLLPLKESTQLQGSESYKECLALLGRVHAAMKMVRIGLVVPQLQYRMYGSLINQMAQVAQNYDREFKQFKLFIIQNQILGSYLLQQNRAFAERELQMESFHAAVISQRREELDNTFAKMDRLSGQMEAESSAMEQAKKEMDEGLRQFQNRQVANALFAVLSAVAQIGLAFLTAGATAPGAVASAGQAVSIAGQAAQGLRRVVEILEQLEAVMEVVAAVKDLVDSLEQVGQIVDAPVMPELPSEADWSIFVNEVEAVAEGMPTEVSEVPVWQARCKNVAALGREMSITAVQMSELQYDIWVQGMMRDMARSQADRLAAIQPADLTNYLEMATQMDMRTTRMLLGLLNILRIQNAALRYEYLLMPTELTTWPLGMDTVGDLLIAQENAALIGLMQLGPSSDFTSRHVVKDIPVNLLLDGEDWEFEIPVQAGMSSFPSSWSRVRIRHLEMHFVKEASGIGGEIIHQPTTQTGTVYILLQGSTIFHDRRRDQVLPFQAAAPLNYHYAYRLDTGDSTLTNEPSEQFANKFMQMTPFTRWRLRLSASAKENAGLAFPTATALDSTTQIVITFHVTAIRQIDWRHDEE

SEQ ID NO: 404 - protein, 867 aa, Artificial Sequence
  Synthetic
MALVDYGKLFEDLNQISMGVLDRVEFSEVMVIHRMYVRLADLNVGQLEGAEKVKRFYIFADIVELPVVEWRWPPQIPGSVTVIILCRLLQWPTDGRQSDTELHLTFMKLHAIQREENRWEITAADGMNWGVYIHAEEVQVGVLTMSWSSVLRVSALRSVITSGFRAVSVFEVPGSVRSTLGATLRPDHALYSTTMQATPNASHISAFNLRIVSPSAYRVCPLQNDTDTYLGIPADVAAVLPVDVVTDPNILLGMQTTVHIAELVKACHPSPDVVSAVGEHLNWLNKLLLPLKESTQLQGSESYKECLALLGRVHAAMKMVRIGLVVPQLQYRMYGSLINQMAQVAQNYDREFKQFKLFIIQNQILGSYLLQQNRAFAERELQMESFHAAVISQRREELDNTFAKMDRLSGQMEAESSAMEQAKKEMDEGLRQFQNRQVANALFAVLSAVAQIGLAFLTAGATAPGAVASAGQAVSIAGQAAQGLRRVVEILEQLEAVMEVVAAVKDLVDSLEQVGQIVDAPVMPELPSEADWSIFVNEVEAVAEGMPTEVSEVPVWIGKCKNVAALGREMSITAVQMSELQYDIWVQGMMRDMARSQADRLAAIQPADLTNYLEMATQMDMRTTRMLLGLLNILRIQNAALRYEYLLMPTELTTWPLGMDTVGDLLIAQENAALIGLMQLGPSSDFTSRHVVKDIPVNLLLDGEDWEFEIPVQAGMSSFPSSWSRVRIRHLEMHFVKEASGIGGEIIHQPTTQTGTVYILLQGSTIFHDRRRDQVLPFQAAAPLNYHYAYRLDTGDSTLTNEPSEQFANKFMQMTPFTRWRLRLSASAKENAGLAFPTATALDSTTQIVITFHVTAIRQIDWRHDEE

SEQ ID NO: 405 - protein, 867 aa, Artificial Sequence
  Synthetic
MALVDYGKLFEDLNQISMGVLDRVEFSEVMVIHRMYVRLADLNVGQLEGAEKVKRFYIFADIVELPVVEWRWPPQIPGSVTVIILCRLLQWPTDGRQSDTELHLTFMKLHAIQREENRWEITAADGMNWGVYIHAEEVQVGVLTMSWSSVLRVSALRSVITSGFRAVSVFEVPGSVRSTLGATLRPDHALYSTTMQATPNASHISAFNLRIVSPSAYRVCPLQNDTDTYLGIPADVAAVLPVDVVTDPNILLGMQTTVHIAELVKACHPSPDVVSAVGEHLNWLNKLLLPLKESTQLQGSESYKECLALLGRVHAAMKMVRIGLVVPQLQYRMYGSLINQMAQVAQNYDREFKQFKLFIIQNQILGSYLLQQNRAFAERELQMESFHAAVISQRREELDNTFAKMDRLSGQMEAESSAMEQAKKEMDEGLRQFQNRQVANALFAVLSAVAQIGLAFLTAGATAPGAVASAGQAVSIAGQAAQGLRRVVEILEQLEAVMEVVAAVKDLVDSLEQVGQIVDAPVMPELPSEADWSIFVNEVEAVAEGMPTEVSEVPVWTVKCKNVAALGREMSITAVQMSELQYDIWVQGMMRDMARSQADRLAAIQPADLTNYLEMATQMDMRTTRMLLGLLNILRIQNAALRYEYLLMPTELTTWPLGMDTVGDLLIAQENAALIGLMQLGPSSDFTSRHVVKDIPVNLLLDGEDWEFEIPVQAGMSSFPSSWSRVRIRHLEMHFVKEASGIGGEIIHQPTTQTGTVYILLQGSTIFHDRRRDQVLPFQAAAPLNYHYAYRLDTGDSTLTNEPSEQFANKFMQMTPFTRWRLRLSASAKENAGLAFPTATALDSTTQIVITFHVTAIRQIDWRHDEE

SEQ ID NO: 406 - protein, 867 aa, Artificial Sequence
  Synthetic
MALVDYGKLFEDLNQISMGVLDRVEFSEVMVIHRMYVRLADLNVGQLEGAEKVKRLYIFADIIELPVVEWRWPPQIPGSVTVIILCRLLQWPTDGRQSDTELHLTFMKLHAIQREENRWEITAADGMNWGVYIHAEEVQVGVLTMSWSSVLRVSALRSVITSGFRAVSVFEVPGSVRSTLGATLRPDHALYSTTMQATPNASHISAFNLRIVSPSAYRVCPLQNDTDTYLGIPADVAAVLPVDVVTDPNILLGMQTTVHIAELVKACHPSPDVVSAVGEHLNWLNKLLLPLKESTQLQGSESYKECLALLGRVHAAMKMVRIGLVVPQLQYRMYGSLINQMAQVAQNYDREFKQFKLFIIQNQILGSYLLQQNRAFAERELQMESFHAAVISQRREELDNTFAKMDRLSGQMEAESSAMEQAKKEMDEGLRQFQNRQVANALFAVLSAVAQIGLAFLTAGATAPGAVASAGQAVSIAGQAAQGLRRVVEILEQLEAVMEVVAAVKDLVDSLEQVGQIVDAPVMPELPSEADWSIFVNEVEAVAEGMPTEVSEVPVWMVKCKNVAALGREMSITAVQMSELQYDIWVQGMMRDMARSQADRLAAIQPADLTNYLEMATQMDMRTTRMLLGLLNILRIQNAALRYEYLLMPTELTTWPLGMDTVGDLLIAQENAALIGLMQLGPSSDFTSRHVVKDIPVNLLLDGEDWEFEIPVQAGMSSFPSSWSRVRIRHLEMHFVKEASGIGGEIIHQPTTQTGTVYILLQGSTIFHDRRRDQVLPFQAAAPLNYHYAYRLDTGDSTLTNEPSEQFANKFMQMTPFTRWRLRLSASAKENAGLAFPTATALDSTTQIVITFHVTAIRQIDWRHDEE

SEQ ID NO: 407 - protein, 867 aa, Artificial Sequence
  Synthetic
MALVDYGKLFEDLNQISMGVLDRVEFSEVMVIHRMYVRLADLNVGQLEGAEKVKRLYIFADIIELPVVEWRWPPQIPGSVTVIILCRLLQWPTDGRQSDTELHLTFMKLHAIQREENRWEITAADGMNWGVYIHAEEVQVGVLTMSWSSVLRVSALRSVITSGFRAVSVFEVPGSVRSTLGATLRPDHALYSTTMQATPNASHISAFNLRIVSPSAYRVCPLQNDTDTYLGIPADVAAVLPVDVVTDPNILLGMQTTVHIAELVKACHPSPDVVSAVGEHLNWLNKLLLPLKESTQLQGSESYKECLALLGRVHAAMKMVRIGLVVPQLQYRMYGSLINQMAQVAQNYDREFKQFKLFIIQNQILGSYLLQQNRAFAERELQMESFHAAVISQRREELDNTFAKMDRLSGQMEAESSAMEQAKKEMDEGLRQFQNRQVANALFAVLSAVAQIGLAFLTAGATAPGAVASAGQAVSIAGQAAQGLRRVVEILEQLEAVMEVVAAVKDLVDSLEQVGQIVDAPVMPELPSEADWSIFVNEVEAVAEGMPTEVSEVPVWQARCKNVAALGREMSITAVQMSELQYDIWVQGMMRDMARSQADRLAAIQPADLTNYLEMATQMDMRTTRMLLGLLNILRIQNAALRYEYLLMPTELTTWPLGMDTVGDLLIAQENAALIGLMQLGPSSDFTSRHVVKDIPVNLLLDGEDWEFEIPVQAGMSSFPSSWSRVRIRHLEMHFVKEASGIGGEIIHQPTTQTGTVYILLQGSTIFHDRRRDQVLPFQAAAPLNYHYAYRLDTGDSTLTNEPSEQFANKFMQMTPFTRWRLRLSASAKENAGLAFPTATALDSTTQIVITFHVTAIRQIDWRHDEE

SEQ ID NO: 408 - protein, 867 aa, Artificial Sequence
  Synthetic
MALVDYGKLFEDLNQISMGVLDRVEFSEVMVIHRMYVRLADLNVGQLEGAEEVKRLYIFADIIELPVVEWRWPPQIPGSVTVIILCRLLQWPTDGRQSDTELHLTFMKLHAIQREENRWEITAADGMNWGVYIHAEEVQVGVLTMSWSSVLRVSALRSVITSGFRAVSVFEVPGSVRSTLGATLRPDHALYSTTMQATPNASHISAFNLRIVSPSAYRVCPLQNDTDTYLGIPADVAAVLPVDVVTDPNILLGMQTTVHIAELVKACHPSPDVVSAVGEHLNWLNKLLLPLKESTQLQGSESYKECLALLGRVHAAMKMVRIGLVVPQLQYRMYGSLINQMAQVAQNYDREFKQFKLFIIQNQILGSYLLQQNRAFAERELQMESFHAAVISQRREELDNTFAKMDRLSGQMEAESSAMEQAKKEMDEGLRQFQNRQVANALFAVLSAVAQIGLAFLTAGATAPGAVASAGQAVSIAGQAAQGLRRVVEILEQLEAVMEVVAAVNDLVDSLEQVGQIVDAPVMPELPSEADWSIFVNEVEAVAEGMPTEVSEVPVWRGKCKSVAALGREMSITAVQMSELQYDIWVQGMMRDMARSQADRLAAIQPADLTNYLEMATQMDMRTTRMLLGLLNILRIQNAALRYEYLLMPTELTTWPLGMDTVGDLLIAQENAALIGLMQLGPSSDFTSRHVVKDIPVNLLLDGEDWEFEIPVQAGMSSFPSSWSRVRIRHLEMHFVKEASGIGGEIIHQPTTQTGTVYILLQGSTIFHDRRRDQVLPFQAAAPLNYHYAYRLDTGDSTLTNEPSEQFANKFMQMTPFTRWRLRLSASAKENAGLAFPTATALDSTTQIVITFHVTAIRQIDWRHDEE

SEQ ID NO: 409 - protein, 867 aa, Artificial Sequence
  Synthetic
MALVDYGKLFEDLNQISMGVLDRVEFSEVMVIHRMYVRLADLNVGQLEGAEKVKRLYIFADIIELPVVEWRWPPQIPGSVTVIILCRLLQWPTDGRQSDTELHLTFMKLHAIQREENRWEITAADGMNWGVYIHAEEVQVGVLTMSWSSVLRVSALRSVITSGFRAVSVFEVPGSVRSTLGATLRPDHALYSTTMQATPNASHISAFNLRIVSPSAYRVCPLQNDTDTYLGIPADVAAVLPVDVVTDPNILLGMQTTVHIAELVKACHPSPDVVSAVGEHLNWLNKLLLPLKESTQLQGSESYKECLALLGRVHAAMKMVRIGLVVPQLQYRMYGSLINQMAQVAQNYDREFKQFKLFIIQNQILGSYLLQQNRAFAERELQMESFHAAVISQRREELDNTFAKMDRLSGQMEAESSAMEQAKKEMDEGLRQFQNRQVANALFAVLSAVAQIGLAFLTAGATAPGAVASAGQAVSIAGQAAQGLRRVVEILEQLEAVMEVVAAVKDLVDSLEQVGQIVDAPVMPELPSEADWSIFVNEVEAVAEGMPTEVSEVPVWRGRCKTVAALGREMSITAVQMSELQYDIWVQGMMRDMARSQADRLAAIQPADLTNYLEMATQMDMRTTRMLLGLLNILRIQNAALRYEYLLMPTELTTWPLGMDTVGDLLIAQENAALIGLMQLGPSSDFTSRHVVKDIPVNLLLDGEDWEFEIPVQAGMSSFPSSWSRVRIRHLEMHFVKEASGIGGEIIHQPTTQTGTVYILLQGSTIFHDRRRDQVLPFQAAAPLNYHYAYRLDTGDSTLTNEPSEQFANKFMQMTPFTRWRLRLSASAKENAGLAFPTATALDSTTQIVITFHVTAIRQIDWRHDEE

SEQ ID NO: 410 - protein, 867 aa, Artificial Sequence
  Synthetic
MALVDYGKLFEDLNQISMGVLDRVEFSEVMVIHRMYVRLADLNVGQLEGAEKVKRLYIFTDVIELPVVEWRWPPQIPGSVTVIILCRLLQWPTDGRQSDTELHLTFMKLHAIQREENRWEITAADGMNWGVYIHAEEVQVGVLTMSWSSVLRVSALRSVITSGFRAVSVFEVPGSVRSTLGATLRPDHALYSTTMQATPNASHISAFNLRIVSPSAYRVCPLQNDTDTYLGIPADVAAVLPVDVVTDPNILLGMQTTVHIAELVKACHPSPDVVSAVGEHLNWLNKLLLPLKESTQLQGSESYKECLALLGRVHAAMKMVRIGLVVPQLQYRMYGSLINQMAQVAQNYDREFKQFKLFIIQNQILGSYLLQQNRAFAERELQMESFHAAVISQRREELDNTFAKMDRLSGQMEAESSAMEQAKKEMDEGLRQFQNRQVANALFAVLSAVAQIGLAFLTAGATAPGAVASAGQAVSIAGQAAQGLRRVVEILEQLEAVMEVVAAVKDLVDSLEQVGQIVDAPVMPELPSEADWSIFVNEVEAVAEGMPTEVSEVPVWIGKCKNVAALGREMSITAVQMSELQYDIWVQGMMRDMARSQADRLAAIQPADLTNYLEMATQMDMRTTRMLLGLLNILRIQNAALRYEYLLMPTELTTWPLGMDTVGDLLIAQENAALIGLMQLGPSSDFTSRHVVKDIPVNLLLDGEDWEFEIPVQAGMSSFPSSWSRVRIRHLEMHFVKEASGIGGEIIHQPTTQTGTVYILLQGSTIFHDRRRDQVLPFQAAAPLNYHYAYRLDTGDSTLTNEPSEQFANKFMQMTPFTRWRLRLSASAKENAGLAFPTATALDSTTQIVITFHVTAIRQIDWRHDEE

SEQ ID NO: 411 - protein, 867 aa, Artificial Sequence
  Synthetic
MALVDYGKLFEDLNQISMGVLDRVEFSEVMVIHRMYVRLADLNVGQLEGAEKVKRLYVFCDIIELPVVEWRWPPQIPGSVTVIILCRLLQWPTDGRQSDTELHLTFMKLHAIQREENRWEITAADGMNWGVYIHAEEVQVGVLTMSWSSVLRVSALRSVITSGFRAVSVFEVPGSVRSTLGATLRPDHALYSTTMQATPNASHISAFNLRIVSPSAYRVCPLQNDTDTYLGIPADVAAVLPVDVVTDPNILLGMQTTVHIAELVKACHPSPDVVSAVGEHLNWLNKLLLPLKESTQLQGSESYKECLALLGRVHAAMKMVRIGLVVPQLQYRMYGSLINQMAQVAQNYDREFKQFKLFIIQNQILGSYLLQQNRAFAERELQMESFHAAVISQRREELDNTFAKMDRLSGQMEAESSAMEQAKKEMDEGLRQFQNRQVANALFAVLSAVAQIGLAFLTAGATAPGAVASAGQAVSIAGQAAQGLRRVVEILEQLEAVMEVVAAVKDLVDSLEQVGQIVDAPVMPELPSEADWSIFVNEVEAVAEGMPTEVSEVPVWLARCKNVAALGREMSITAVQMSELQYDIWVQGMMRDMARSQADRLAAIQPADLTNYLEMATQMDMRTTRMLLGLLNILRIQNAALRYEYLLMPTELTTWPLGMDTVGDLLIAQENAALIGLMQLGPSSDFTSRHVVKDIPVNLLLDGEDWEFEIPVQAGMSSFPSSWSRVRIRHLEMHFVKEASGIGGEIIHQPTTQTGTVYILLQGSTIFHDRRRDQVLPFQAAAPLNYHYAYRLDTGDSTLTNEPSEQFANKFMQMTPFTRWRLRLSASAKENAGLAFPTATALDSTTQIVITFHVTAIRQIDWRHDEE

SEQ ID NO: 412 - protein, 867 aa, Artificial Sequence
  Synthetic
MALVDYGKLFEDLNQISMGVLDRVEFSEVMVIHRMYVRLADLNVGQLEGAEKVKRLYVFSDIIELPVVEWRWPPQIPGSVTVIILCRLLQWPTDGRQSDTELHLTFMKLHAIQREENRWEITAADGMNWGVYIHAEEVQVGVLTMSWSSVLRVSALRSVITSGFRAVSVFEVPGSVRSTLGATLRPDHALYSTTMQATPNASHISAFNLRIVSPSAYRVCPLQNDTDTYLGIPADVAAVLPVDVVTDPNILLGMQTTVHIAELVKACHPSPDVVSAVGEHLNWLNKLLLPLKESTQLQGSESYKECLALLGRVHAAMKMVRIGLVVPQLQYRMYGSLINQMAQVAQNYDREFKQFKLFIIQNQILGSYLLQQNRAFAERELQMESFHAAVISQRREELDNTFAKMDRLSGQMEAESSAMEQAKKEMDEGLRQFQNRQVANALFAVLSAVAQIGLAFLTAGATAPGAVASAGQAVSIAGQAAQGLRRVVEILEQLEAVMEVVAAVKDLVDSLEQVGQIVDAPVMPELPSEADWSIFVNEVEAVAEGMPTEVSEVPVWIGKCKNVAALGREMSITAVQMSELQYDIWVQGMMRDMARSQADRLAAIQPADLTNYLEMATQMDMRTTRMLLGLLNILRIQNAALRYEYLLMPTELTTWPLGMDTVGDLLIAQENAALIGLMQLGPSSDFTSRHVVKDIPVNLLLDGEDWEFEIPVQAGMSSFPSSWSRVRIRHLEMHFVKEASGIGGEIIHQPTTQTGTVYILLQGSTIFHDRRRDQVLPFQAAAPLNYHYAYRLDTGDSTLTNEPSEQFANKFMQMTPFTRWRLRLSASAKENAGLAFPTATALDSTTQIVITFHVTAIRQIDWRHDEE

SEQ ID NO: 413 - protein, 867 aa, Artificial Sequence
  Synthetic
MALVDYGKLFEDLNQISMGVLDRVEFSEVMVIHRMYVRLADLNVGQLEGAEKVKRLYVFSDIIELPVVEWRWPPQIPGSVTVIILCRLLQWPTDGRQSDTELHLTFMKLHAIQREENRWEITAADGMNWGVYIHAEEVQVGVLTMSWSSVLRVSALRSVITSGFRAVSVFEVPGSVRSTLGATLRPDHALYSTTMQATPNASHISAFNLRIVSPSAYRVCPLQNDTDTYLGIPADVAAVLPVDVVTDPNILLGMQTTVHIAELVKACHPSPDVVSAVGEHLNWLNKLLLPLKESTQLQGSESYKECLALLGRVHAAMKMVRIGLVVPQLQYRMYGSLINQMAQVAQNYDREFKQFKLFIIQNQILGSYLLQQNRAFAERELQMESFHAAVISQRREELDNTFAKMDRLSGQMEAESSAMEQAKKEMDEGLRQFQNRQVANALFAVLSAVAQIGLAFLTAGATAPGAVASAGQAVSIAGQAAQGLRRVVEILEQLEAVMEVVAAVKDLVDSLEQVGQIVDAPVMPELPSEADWSIFVNEVEAVAEGMPTEVSEVPVWRGRCKTVAALGREMSITAVQMSELQYDIWVQGMMRDMARSQADRLAAIQPADLTNYLEMATQMDMRTTRMLLGLLNILRIQNAALRYEYLLMPTELTTWPLGMDTVGDLLIAQENAALIGLMQLGPSSDFTSRHVVKDIPVNLLLDGEDWEFEIPVQAGMSSFPSSWSRVRIRHLEMHFVKEASGIGGEIIHQPTTQTGTVYILLQGSTIFHDRRRDQVLPFQAAAPLNYHYAYRLDTGDSTLTNEPSEQFANKFMQMTPFTRWRLRLSASAKENAGLAFPTATALDSTTQIVITFHVTAIRQIDWRHDEE

SEQ ID NO: 414 - protein, 867 aa, Artificial Sequence
  Synthetic
MALVDYGKLFEDLNQISMGVLDRVEFSEVMVIHRMYVRLADLNVGQLEGAEKVKRLYVFSDVIELPVVEWRWPPQIPGSVTVIILCRLLQWPTDGRQSDTELHLTFMKLHAIQREENRWEITAADGMNWGVYIHAEEVQVGVLTMSWSSVLRVSALRSVITSGFRAVSVFEVPGSVRSTLGATLRPDHALYSTTMQATPNASHISAFNLRIVSPSAYRVCPLQNDTDTYLGIPADVAAVLPVDVVTDPNILLGMQTTVHIAELVKACHPSPDVVSAVGEHLNWLNKLLLPLKESTQLQGSESYKECLALLGRVHAAMKMVRIGLVVPQLQYRMYGSLINQMAQVAQNYDREFKQFKLFIIQNQILGSYLLQQNRAFAERELQMESFHAAVISQRREELDNTFAKMDRLSGQMEAESSAMEQAKKEMDEGLRQFQNRQVANALFAVLSAVAQIGLAFLTAGATAPGAVASAGQAVSIAGQAAQGLRRVVEILEQLEAVMEVVAAVKDLVDSLEQVGQIVDAPVMPELPSEADWSIFVNEVEAVAEGMPTEVSEVPVWRGKCKSVAALGREMSITAVQMSELQYDIWVQGMMRDMARSQADRLAAIQPADLTNYLEMATQMDMRTTRMLLGLLNILRIQNAALRYEYLLMPTELTTWPLGMDTVGDLLIAQENAALIGLMQLGPSSDFTSRHVVKDIPVNLLLDGEDWEFEIPVQAGMSSFPSSWSRVRIRHLEMHFVKEASGIGGEIIHQPTTQTGTVYILLQGSTIFHDRRRDQVLPFQAAAPLNYHYAYRLDTGDSTLTNEPSEQFANKFMQMTPFTRWRLRLSASAKENAGLAFPTATALDSTTQIVITFHVTAIRQIDWRHDEE

SEQ ID NO: 415 - protein, 867 aa, Artificial Sequence
  Synthetic
MALVDYGKLFEDLNQISMGVLDRVEFSEVMVIHRMYVRLADLNVGQLEGAEKVKRLYVFSDVIELPVVEWRWPPQIPGSVTVIILCRLLQWPTDGRQSDTELHLTFMKLHAIQREENRWEITAADGMNWGVYIHAEEVQVGVLTMSWSSVLRVSALRSVITSGFRAVSVFEVPGSVRSTLGATLRPDHALYSTTMQATPNASHISAFNLRIVSPSAYRVCPLQNDTDTYLGIPADVAAVLPVDVVTDPNILLGMQTTVHIAELVKACHPSPDVVSAVGEHLNWLNKLLLPLKESTQLQGSESYKECLALLGRVHAAMKMVRIGLVVPQLQYRMYGSLINQMAQVAQNYDREFKQFKLFIIQNQILGSYLLQQNRAFAERELQMESFHAAVISQRREELDNTFAKMDRLSGQMEAESSAMEQAKKEMDEGLRQFQNRQVANALFAVLSAVAQIGLAFLTAGATAPGAVASAGQAVSIAGQAAQGLRRVVEILEQLEAVMEVVAAVKDLVDSLEQVGQIVDAPVMPELPSEADWSIFVNEVEAVAEGMPTEVSEVPVWRVKCKNVAALGREMSITAVQMSELQYDIWVQGMMRDMARSQADRLAAIQPADLTNYLEMATQMDMRTTRMLLGLLNILRIQNAALRYEYLLMPTELTTWPLGMDTVGDLLIAQENAALIGLMQLGPSSDFTSRHVVKDIPVNLLLDGEDWEFEIPVQAGMSSFPSSWSRVRIRHLEMHFVKEASGIGGEIIHQPTTQTGTVYILLQGSTIFHDRRRDQVLPFQAAAPLNYHYAYRLDTGDSTLTNEPSEQFANKFMQMTPFTRWRLRLSASAKENAGLAFPTATALDSTTQIVITFHVTAIRQIDWRHDEE

SEQ ID NO: 416 - protein, 867 aa, Artificial Sequence
  Synthetic
MALVDYGKLFEDLNQISMGVLDRVEFSEVMVIHRMYVRLADLNVGQLEGAEKVMRLYIFADVVELPVVEWRWPPQIPGSVTVIILCRLLQWPTDGRQSDTELHLTFMKLHAIQREENRWEITAADGMNWGVYIHAEEVQVGVLTMSWSSVLRVSALRSVITSGFRAVSVFEVPGSVRSTLGATLRPDHALYSTTMQATPNASHISAFNLRIVSPSAYRVCPLQNDTDTYLGIPADVAAVLPVDVVTDPNILLGMQTTVHIAELVKACHPSPDVVSAVGEHLNWLNKLLLPLKESTQLQGSESYKECLALLGRVHAAMKMVRIGLVVPQLQYRMYGSLINQMAQVAQNYDREFKQFKLFIIQNQILGSYLLQQNRAFAERELQMESFHAAVISQRREELDNTFAKMDRLSGQMEAESSAMEQAKKEMDEGLRQFQNRQVANALFAVLSAVAQIGLAFLTAGATAPGAVASAGQAVSIAGQAAQGLRRVVEILEQLEAVMEVVAAVKDLVDSLEQVGQIVDAPVMPELPSEADWSIFVNEVEAVAEGMPTEVSEVPVWRGKCKSVAALGREMSITAVQMSELQYDIWVQGMMRDMARSQADRLAAIQPADLTNYLEMATQMDMRTTRMLLGLLNILRIQNAALRYEYLLMPTELTTWPLGMDTVGDLLIAQENAALIGLMQLGPSSDFTSRHVVKDIPVNLLLDGEDWEFEIPVQAGMSSFPSSWSRVRIRHLEMHFVKEASGIGGEIIHQPTTQTGTVYILLQGSTIFHDRRRDQVLPFQAAAPLNYHYAYRLDTGDSTLTNEPSEQFANKFMQMTPFTRWRLRLSASAKENAGLAFPTATALDSTTQIVITFHVTAIRQIDWRHDEE

SEQ ID NO: 417 - protein, 867 aa, Artificial Sequence
  Synthetic
MALVDYGKLFEDLNQISMGVLDRVEFSEVMVIHRMYVRLADLNVGQLEGAEKVRHLYIFCDVIELPVVEWRWPPQIPGSVTVIILCRLLQWPTDGRQSDTELHLTFMKLHAIQREENRWEITAADGMNWGVYIHAEEVQVGVLTMSWSSVLRVSALRSVITSGFRAVSVFEVPGSVRSTLGATLRPDHALYSTTMQATPNASHISAFNLRIVSPSAYRVCPLQNDTDTYLGIPADVAAVLPVDVVTDPNILLGMQTTVHIAELVKACHPSPDVVSAVGEHLNWLNKLLLPLKESTQLQGSESYKECLALLGRVHAAMKMVRIGLVVPQLQYRMYGSLINQMAQVAQNYDREFKQFKLFIIQNQILGSYLLQQNRAFAERELQMESFHAAVISQRREELDNTFAKMDRLSGQMEAESSAMEQAKKEMDEGLRQFQNRQVANALFAVLSAVAQIGLAFLTAGATAPGAVASAGQAVSIAGQAAQGLRRVVEILEQLEAVMEVVAAVKDLVDSLEQVGQIVDAPVMPELPSEADWSIFVNEVEAVAEGMPTEVSEVPVWIGKCKNVAALGREMSITAVQMSELQYDIWVQGMMRDMARSQADRLAAIQPADLTNYLEMATQMDMRTTRMLLGLLNILRIQNAALRYEYLLMPTELTTWPLGMDTVGDLLIAQENAALIGLMQLGPSSDFTSRHVVKDIPVNLLLDGEDWEFEIPVQAGMSSFPSSWSRVRIRHLEMHFVKEASGIGGEIIHQPTTQTGTVYILLQGSTIFHDRRRDQVLPFQAAAPLNYHYAYRLDTGDSTLTNEPSEQFANKFMQMTPFTRWRLRLSASAKENAGLAFPTATALDSTTQIVITFHVTAIRQIDWRHDEE

SEQ ID NO: 418 - protein, 867 aa, Artificial Sequence
  Synthetic
MALVDYGKLFEDLNQISMGVLDRVEFSEVMVIHRMYVRLADLNVGQLEGAEKVRHLYIFSDVVELPVVEWRWPPQIPGSVTVIILCRLLQWPTDGRQSDTELHLTFMKLHAIQREENRWEITAADGMNWGVYIHAEEVQVGVLTMSWSSVLRVSALRSVITSGFRAVSVFEVPGSVRSTLGATLRPDHALYSTTMQATPNASHISAFNLRIVSPSAYRVCPLQNDTDTYLGIPADVAAVLPVDVVTDPNILLGMQTTVHIAELVKACHPSPDVVSAVGEHLNWLNKLLLPLKESTQLQGSESYKECLALLGRVHAAMKMVRIGLVVPQLQYRMYGSLINQMAQVAQNYDREFKQFKLFIIQNQILGSYLLQQNRAFAERELQMESFHAAVISQRREELDNTFAKMDRLSGQMEAESSAMEQAKKEMDEGLRQFQNRQVANALFAVLSAVAQIGLAFLTAGATAPGAVASAGQAVSIAGQAAQGLRRVVEILEQLEAVMEVVAAVKDLVDSLEQVGQIVDAPVMPELPSEADWSIFVNEVEAVAEGMPTEVSEVPVWMVKCKNVAALGREMSITAVQMSELQYDIWVQGMMRDMARSQADRLAAIQPADLTNYLEMATQMDMRTTRMLLGLLNILRIQNAALRYEYLLMPTELTTWPLGMDTVGDLLIAQENAALIGLMQLGPSSDFTSRHVVKDIPVNLLLDGEDWEFEIPVQAGMSSFPSSWSRVRIRHLEMHFVKEASGIGGEIIHQPTTQTGTVYILLQGSTIFHDRRRDQVLPFQAAAPLNYHYAYRLDTGDSTLTNEPSEQFANKFMQMTPFTRWRLRLSASAKENAGLAFPTATALDSTTQIVITFHVTAIRQIDWRHDEE

SEQ ID NO: 419 - protein, 867 aa, Artificial Sequence
  Synthetic
MALVDYGKLFEDLNQISMGVLDRVEFSEVMVIHRMYVRLADLNVGQLEGAEKVRHLYIFSDVVELPVVEWRWPPQIPGSVTVIILCRLLQWPTDGRQSDTELHLTFMKLHAIQREENRWEITAADGMNWGVYIHAEEVQVGVLTMSWSSVLRVSALRSVITSGFRAVSVFEVPGSVRSTLGATLRPDHALYSTTMQATPNASHISAFNLRIVSPSAYRVCPLQNDTDTYLGIPADVAAVLPVDVVTDPNILLGMQTTVHIAELVKACHPSPDVVSAVGEHLNWLNKLLLPLKESTQLQGSESYKECLALLGRVHAAMKMVRIGLVVPQLQYRMYGSLINQMAQVAQNYDREFKQFKLFIIQNQILGSYLLQQNRAFAERELQMESFHAAVISQRREELDNTFAKMDRLSGQMEAESSAMEQAKKEMDEGLRQFQNRQVANALFAVLSAVAQIGLAFLTAGATAPGAVASAGQAVSIAGQAAQGLRRVVEILEQLEAVMEVVAAVNDLVDSLEQVGQIVDAPVMPELPSEADWSIFVNEVEAVAEGMPTEVSEVPVWRGKCKSVAALGREMSITAVQMSELQYDIWVQGMMRDMARSQADRLAAIQPADLTNYLEMATQMDMRTTRMLLGLLNILRIQNAALRYEYLLMPTELTTWPLGMDTVGDLLIAQENAALIGLMQLGPSSDFTSRHVVKDIPVNLLLDGEDWEFEIPVQAGMSSFPSSWSRVRIRHLEMHFVKEASGIGGEIIHQPTTQTGTVYILLQGSTIFHDRRRDQVLPFQAAAPLNYHYAYRLDTGDSTLTNEPSEQFANKFMQMTPFTRWRLRLSASAKENAGLAFPTATALDSTTQIVITFHVTAIRQIDWRHDEE

SEQ ID NO: 420 - protein, 867 aa, Artificial Sequence
  Synthetic
MALVDYGKLFEDLNQISMGVLDRVEFSEVMVIHRMYVRLADLNVGQLEGAEKVRQLYVFCDVLVLPVVEWRWPPQIPGSVTVIILCRLLQWPTDGRQSDTELHLTFMKLHAIQREENRWEITAADGMNWGVYIHAEEVQVGVLTMSWSSVLRVSALRSVITSGFRAVSVFEVPGSVRSTLGATLRPDHALYSTTMQATPNASHISAFNLRIVSPSAYRVCPLQNDTDTYLGIPADVAAVLPVDVVTDPNILLGMQTTVHIAELVKACHPSPDVVSAVGEHLNWLNKLLLPLKESTQLQGSESYKECLALLGRVHAAMKMVRIGLVVPQLQYRMYGSLINQMAQVAQNYDREFKQFKLFIIQNQILGSYLLQQNRAFAERELQMESFHAAVISQRREELDNTFAKMDRLSGQMEAESSAMEQAKKEMDEGLRQFQNRQVANALFAVLSAVAQIGLAFLTAGATAPGAVASAGQAVSIAGQAAQGLRRVVEILEQLEAVMEVVAAVKDLVDSLEQVGQIVDAPVMPELPSEADWSIFVNEVEAVAEGMPTEVSEVPVWHGKCKNVAALGREMSITAVQMSELQYDIWVQGMMRDMARSQADRLAAIQPADLTNYLEMATQMDMRTTRMLLGLLNILRIQNAALRYEYLLMPTELTTWPLGMDTVGDLLIAQENAALIGLMQLGPSSDFTSRHVVKDIPVNLLLDGEDWEFEIPVQAGMSSFPSSWSRVRIRHLEMHFVKEASGIGGEIIHQPTTQTGTVYILLQGSTIFHDRRRDQVLPFQAAAPLNYHYAYRLDTGDSTLTNEPSEQFANKFMQMTPFTRWRLRLSASAKENAGLAFPTATALDSTTQIVITFHVTAIRQIDWRHDEE

SEQ ID NO: 421 - protein, 867 aa, Artificial Sequence
  Synthetic
MALVDYGKLFEDLNQISMGVLDRVEFSEVMVIHRMYVRLADLNVGQLEGAEKVRQLYVFCDVLVLPVVEWRWPPQIPGSVTVIILCRLLQWPTDGRQSDTELHLTFMKLHAIQREENRWEITAADGMNWGVYIHAEEVQVGVLTMSWSSVLRVSALRSVITSGFRAVSVFEVPGSVRSTLGATLRPDHALYSTTMQATPNASHISAFNLRIVSPSAYRVCPLQNDTDTYLGIPADVAAVLPVDVVTDPNILLGMQTTVHIAELVKACHPSPDVVSAVGEHLNWLNKLLLPLKESTQLQGSESYKECLALLGRVHAAMKMVRIGLVVPQLQYRMYGSLINQMAQVAQNYDREFKQFKLFIIQNQILGSYLLQQNRAFAERELQMESFHAAVISQRREELDNTFAKMDRLSGQMEAESSAMEQAKKEMDEGLRQFQNRQVANALFAVLSAVAQIGLAFLTAGATAPGAVASAGQAVSIAGQAAQGLRRVVEILEQLEAVMEVVAAVKDLVDSLEQVGQIVDAPVMPELPSEADWSIFVNEVEAVAEGMPTEVSEVPVWLGRCKNVAALGREMSITAVQMSELQYDIWVQGMMRDMARSQADRLAAIQPADLTNYLEMATQMDMRTTRMLLGLLNILRIQNAALRYEYLLMPTELTTWPLGMDTVGDLLIAQENAALIGLMQLGPSSDFTSRHVVKDIPVNLLLDGEDWEFEIPVQAGMSSFPSSWSRVRIRHLEMHFVKEASGIGGEIIHQPTTQTGTVYILLQGSTIFHDRRRDQVLPFQAAAPLNYHYAYRLDTGDSTLTNEPSEQFANKFMQMTPFTRWRLRLSASAKENAGLAFPTATALDSTTQIVITFHVTAIRQIDWRHDEE

SEQ ID NO: 422 - protein, 867 aa, Artificial Sequence
  Synthetic
IALVDYGKLFEDLNQISMGVLDRVEFSEVMVIHRMYVRLADLNVGQLEGAEKVRQLYVFCDVLVLPVVEWRWPPQIPGSVTVIILCRLLQWPTDGRQSDTELHLTFMKLHAIQREENRWEITAADGMNWGVYIHAEEVQVGVLTMSWSSVLRVSALRSVITSGFRAVSVFEVPGSVRSTLGATLRPDHALYSTTMQATPNASHISAFNLRIVSPSAYRVCPLQNDTDTYLGIPADVAAVLPVDVVTDPNILLGMQTTVHIAELVKACHPSPDVVSAVGEHLNWLNKLLLPLKESTQLQGSESYKECLALLGRVHAAMKMVRIGLVVPQLQYRMYGSLINQMAQVAQNYDREFKQFKLFIIQNQILGSYLLQQNRAFAERELQMESFHAAVISQRREELDNTFAKMDRLSGQMEAESSAMEQAKKEMDEGLRQFQNRQVANALFAVLSAVAQIGLAFLTAGATAPGAVASAGQAVSIAGQAAQGLRRVVEILEQLEAVMEVVAAVKDLVDSLEQVGQIVDAPVMPELPSEADWSIFVNEVEAVAEGMPTEVSEVPVWRGKCKSVAALGREMSITAVQMSELQYDIWVQGMMRDMARSQADRLAAIQPADLTNYLEMATQMDMRTTRMLLGLLNILRIQNAALRYEYLLMPTELTTWPLGMDTVGDLLIAQENAALIGLMQLGPSSDFTSRHVVKDIPVNLLLDGEDWEFEIPVQAGMSSFPSSWSRVRIRHLEMHFVKEASGIGGEIIHQPTTQTGTVYILLQGSTIFHDRRRDQVLPFQAAAPLNYHYAYRLDTGDSTLTNEPSEQFANKFMQMTPFTRWRLRLSASAKENAGLAFPTATALDSTTQIVITFHVTAIRQIDWRHDEE

SEQ ID NO: 423 - protein, 867 aa, Artificial Sequence
  Synthetic
MALVDYGKLFEDLNQISMGVLDRVEFSEVMVIHRMYVRLADLNVGQLEGAEKVRRLYIFADILELPVVEWRWPPQIPGSVTVIILCRLLQWPTDGRQSDTELHLTFMKLHAIQREENRWEITAADGMNWGVYIHAEEVQVGVLTMSWSSVLRVSALRSVITSGFRAVSVFEVPGSVRSTLGATLRPDHALYSTTMQATPNASHISAFNLRIVSPSAYRVCPLQNDTDTYLGIPADVAAVLPVDVVTDPNILLGMQTTVHIAELVKACHPSPDVVSAVGEHLNWLNKLLLPLKESTQLQGSESYKECLALLGRVHAAMKMVRIGLVVPQLQYRMYGSLINQMAQVAQNYDREFKQFKLFIIQNQILGSYLLQQNRAFAERELQMESFHAAVISQRREELDNTFAKMDRLSGQMEAESSAMEQAKKEMDEGLRQFQNRQVANALFAVLSAVAQIGLAFLTAGATAPGAVASAGQAVSIAGQAAQGLRRVVEILEQLEAVMEVVAAVKDLVDSLEQVGQIVDAPVMPELPSEADWSIFVNEVEAVAEGMPTEVSEVPVWMVKCKNVAALGREMSITAVQMSELQYDIWVQGMMRDMARSQADRLAAIQPADLTNYLEMATQMDMRTTRMLLGLLNILRIQNAALRYEYLLMPTELTTWPLGMDTVGDLLIAQENAALIGLMQLGPSSDFTSRHVVKDIPVNLLLDGEDWEFEIPVQAGMSSFPSSWSRVRIRHLEMHFVKEASGIGGEIIHQPTTQTGTVYILLQGSTIFHDRRRDQVLPFQAAAPLNYHYAYRLDTGDSTLTNEPSEQFANKFMQMTPFTRWRLRLSASAKENAGLAFPTATALDSTTQIVITFHVTAIRQIDWRHDEE

SEQ ID NO: 424 - protein, 867 aa, Artificial Sequence
  Synthetic
MALVDYGKLFEDLNQISMGVLDRVEFSEVMVIHRMYVRLADLNVGQLEGAEKVRRLYVFCDVVVLPVVEWRWPPQIPGSVTVIILCRLLQWPTDGRQSDTELHLTFMKLHAIQREENRWEITAADGMNWGVYIHAEEVQVGVLTMSWSSVLRVSALRSVITSGFRAVSVFEVPGSVRSTLGATLRPDHALYSTTMQATPNASHISAFNLRIVSPSAYRVCPLQNDTDTYLGIPADVAAVLPVDVVTDPNILLGMQTTVHIAELVKACHPSPDVVSAVGEHLNWLNKLLLPLKESTQLQGSESYKECLALLGRVHAAMKMVRIGLVVPQLQYRMYGSLINQMAQVAQNYDREFKQFKLFIIQNQILGSYLLQQNRAFAERELQMESFHAAVISQRREELDNTFAKMDRLSGQMEAESSAMEQAKKEMDEGLRQFQNRQVANALFAVLSAVAQIGLAFLTAGATAPGAVASAGQAVSIAGQAAQGLRRVVEILEQLEAVMEVVAAVKDLVDSLEQVGQIVDAPVMPELPSEADWSIFVNEVEAVAEGMPTEVSEVPVWRARCKNVAALGREMSITAVQMSELQYDIWVQGMMRDMARSQADRLAAIQPADLTNYLEMATQMDMRTTRMLLGLLNILRIQNAALRYEYLLMPTELTTWPLGMDTVGDLLIAQENAALIGLMQLGPSSDFTSRHVVKDIPVNLLLDGEDWEFEIPVQAGMSSFPSSWSRVRIRHLEMHFVKEASGIGGEIIHQPTTQTGTVYILLQGSTIFHDRRRDQVLPFQAAAPLNYHYAYRLDTGDSTLTNEPSEQFANKFMQMTPFTRWRLRLSASAKENAGLAFPTATALDSTTQIVITFHVTAIRQIDWRHDEE

SEQ ID NO: 425 - protein, 867 aa, Artificial Sequence
  Synthetic
MALVDYGKLFEDLNQISMGVLDRVEFSEVMVIHRMYVRLADLNVGQLEGAEKVRRLYVFTDVLVLPVVEWRWPPQIPGSVTVIILCRLLQWPTDGRQSDTELHLTFMKLHAIQREENRWEITAADGMNWGVYIHAEEVQVGVLTMSWSSVLRVSALRSVITSGFRAVSVFEVPGSVRSTLGATLRPDHALYSTTMQATPNASHISAFNLRIVSPSAYRVCPLQNDTDTYLGIPADVAAVLPVDVVTDPNILLGMQTTVHIAELVKACHPSPDVVSAVGEHLNWLNKLLLPLKESTQLQGSESYKECLALLGRVHAAMKMVRIGLVVPQLQYRMYGSLINQMAQVAQNYDREFKQFKLFIIQNQILGSYLLQQNRAFAERELQMESFHAAVISQRREELDNTFAKMDRLSGQMEAESSAMEQAKKEMDEGLRQFQNRQVANALFAVLSAVAQIGLAFLTAGATAPGAVASAGQAVSIAGQAAQGLRRVVEILEQLEAVMEVVAAVKDLVDSLEQVGQIVDAPVMPELPSEADWSIFVNEVEAVAEGMPTEVSEVPVWIGKCKNVAALGREMSITAVQMSELQYDIWVQGMMRDMARSQADRLAAIQPADLTNYLEMATQMDMRTTRMLLGLLNILRIQNAALRYEYLLMPTELTTWPLGMDTVGDLLIAQENAALIGLMQLGPSSDFTSRHVVKDIPVNLLLDGEDWEFEIPVQAGMSSFPSSWSRVRIRHLEMHFVKEASGIGGEIIHQPTTQTGTVYILLQGSTIFHDRRRDQVLPFQAAAPLNYHYAYRLDTGDSTLTNEPSEQFANKFMQMTPFTRWRLRLSASAKENAGLAFPTATALDSTTQIVITFHVTAIRQIDWRHDEE

SEQ ID NO: 426 - protein, 867 aa, Artificial Sequence
  Synthetic
MALVDYGKLFEDLNQISMGVLDRVEFSEVMVIHRMYVRLADLNVGQLEGAEKVRRLYVFTDVLVLPVVEWRWPPQIPGSVTVIILCRLLQWPTDGRQSDTELHLTFMKLHAIQREENRWEITAADGMNWGVYIHAEEVQVGVLTMSWSSVLRVSALRSVITSGFRAVSVFEVPGSVRSTLGATLRPDHALYSTTMQATPNASHISAFNLRIVSPSAYRVCPLQNDTDTYLGIPADVAAVLPVDVVTDPNILLGMQTTVHIAELVKACHPSPDVVSAVGEHLNWLNKLLLPLKESTQLQGSESYKECLALLGRVHAAMKMVRIGLVVPQLQYRMYGSLINQMAQVAQNYDREFKQFKLFIIQNQILGSYLLQQNRAFAERELQMESFHAAVISQRREELDNTFAKMDRLSGQMEAESSAMEQAKKEMDEGLRQFQNRQVANALFAVLSAVAQIGLAFLTAGATAPGAVASAGQAVSIAGQAAQGLRRVVEILEQLEAVMEVVAAVKDLVDSLEQVGQIVDAPVMPELPSEADWSIFVNEVEAVAEGMPTEVSEVPVWRARCKNVAALGREMSITAVQMSELQYDIWVQGMMRDMARSQADRLAAIQPADLTNYLEMATQMDMRTTRMLLGLLNILRIQNAALRYEYLLMPTELTTWPLGMDTVGDLLIAQENAALIGLMQLGPSSDFTSRHVVKDIPVNLLLDGEDWEFEIPVQAGMSSFPSSWSRVRIRHLEMHFVKEASGIGGEIIHQPTTQTGTVYILLQGSTIFHDRRRDQVLPFQAAAPLNYHYAYRLDTGDSTLTNEPSEQFANKFMQMTPFTRWRLRLSASAKENAGLAFPTATALDSTTQIVITFHVTAIRQIDWRHDEE

SEQ ID NO: 427 - protein, 867 aa, Artificial Sequence
  Synthetic
MALVDYGKLFEDLNQISMGVLDRVEFSEVMVIHRMYVRLADLNVGQLEGAEKVRRLYVFTDVLVLPVVEWRWPPQIPGSVTVIILCRLLQWPTDGRQSDTELHLTFMKLHAIQREENRWEITAADGMNWGVYIHAEEVQVGVLTMSWSSVLRVSALRSVITSGFRAVSVFEVPGSVRSTLGATLRPDHALYSTTMQATPNASHISAFNLRIVSPSAYRVCPLQNDTDTYLGIPADVAAVLPVDVVTDPNILLGMQTTVHIAELVKACHPSPDVVSAVGEHLNWLNKLLLPLKESTQLQGSESYKECLALLGRVHAAMKMVRIGLVVPQLQYRMYGSLINQMAQVAQNYDREFKQFKLFIIQNQILGSYLLQQNRAFAERELQMESFHAAVISQRREELDNTFAKMDRLSGQMEAESSAMEQAKKEMDEGLRQFQNRQVANALFAVLSAVAQIGLAFLTAGATAPGAVASAGQAVSIAGQAAQGLRRVVEILEQLEAVMEVVAAVKDLVDSLEQVGQIVDAPVMPELPSEADWSIFVNEVEAVAEGMPTEVSEVPVWTVKCKNVAALGREMSITAVQMSELQYDIWVQGMMRDMARSQADRLAAIQPADLTNYLEMATQMDMRTTRMLLGLLNILRIQNAALRYEYLLMPTELTTWPLGMDTVGDLLIAQENAALIGLMQLGPSSDFTSRHVVKDIPVNLLLDGEDWEFEIPVQAGMSSFPSSWSRVRIRHLEMHFVKEASGIGGEIIHQPTTQTGTVYILLQGSTIFHDRRRDQVLPFQAAAPLNYHYAYRLDTGDSTLTNEPSEQFANKFMQMTPFTRWRLRLSASAKENAGLAFPTATALDSTTQIVITFHVTAIRQIDWRHDEE

SEQ ID NO: 428 - DNA, 2556 bp, Artificial Sequence
  Synthetic
atggattacagcacgctttacagggatctgaaccagataagcatgcccctggatcgggtagagttctcagaggtgatggtaatccacaggatgtacttgaggttatctgatctgaatgtgggggagctccccggagccgagagggtgaagcggttgtatgtgttggcagacgtggtggagctcgcaacatttgcgcatccacagttgcttaatacgcggatgccaggatcggtgacggtgatcattctgtgtcgtcttcttcagtttccaactgatgggtcgttcgctgcttggctcgagctgccgttcatggagttgcacacactcatagaacaatacaggtcagagataaaagcagcagatgacgcgaaatggggaacgtatgtacacgcagaggaagtacagctcagcccgctgtttaatgggtggccttatctggttgttgaggcacagcgctgtattataaccgcggccatgcacaatacatttaaccgccctgggtgggttcgctccattactcaatttacaactgatcagtccggtcgggtagataccacactgctcgcacgaacagaattcggccatattgatctaccactcgaaacagattccccaacggcattcagtgtttcacaccgccaaagtacgaatttgcccgtagagtacaccggtattccagtggaggtggtgaccgatcctaacatcttgatgggcatgcaaaccagcgtgcacattgcggagctagtgaaggcatgttacccgtcaccagaattagtgagcgctgtaggggtgcacgtgaattggctcaacgaagtcttgctccgagttgtccagaaggaatctcagttgcaagggaccgaggcctacaacgagtgccttgcgcttttaggtcgcattcaatgtgtcatgaagatggggccgtttgtctcggtagtgccgcagctgcaatacagaatgtacggtagcctcatcaaccaaatggcccaagtagcacaaaactacgaccgagaattcaagcaattcaaattattcatcatccaaaatcaaatccttggcagctatttgctgcagcagaacagggcatttgctgagagggagctgcagatggagagctttcatgctgctgtcatttctcaaagaagggaggagttggacaatacattcgcaaagatggaccgattgagcgggcaaatggaggcagagagtagtgcaatggagcaagccaaaaaggaaatggacgaaggattgaggcagttccagaataggcaagttgcgaacgccctctttgccgttcttagcgctgtagctcagattgggcttgcattccttacggctggtgcaacggctcctggagctgtggcgtcggcggggcaagctgtgagcatagcaggtcaggcggcgcaaggtctgcgaagggtggtggaaattctagagcagctggaggctgtgatggaggttgtggctgctgtgaaggaccttgtggatgctctggaccaggtaagtcagattgtggatgcaccacctatgccagacatgccctcggaggcggactggagtatttttgtgaatgagattgaagccgtggcagaggggatgccgacggaagtctcggaggttccggcgtggaaggccaagtgcaagaatgtggctgcactgggtagggagatgtgcatcacggcagaacagatttcccagctccagtatgacatctgggtgcaaggcttgttgcgggatatggctcgaagccaggcagacaggctggccgcaattcaacctgctaatcttaccaactatttggagatggcaatacagatggatatgcggactacgaggatactgatagggctcctcaacataatgcgcatccagaatgcggcacttatgtatgagtaccttctaacgcccacgcagctcactgcatggccgctgagaatggatactgtggccaacttgctcatcacgcacgagagtgctgcactgtcaggattagctcagttagggcccccatcggacttcacgagcaggcatgtagtgaaaggcatacctgtgagcttgcttctagacggtggggattgggaatttgagattcctgtgcaaggtggcatgtccagtttcccttccagctggactcgagtgcggattcggcacctggagatgcactttgtgcaggaggcgagcggtggcggcgagattatccaccagcctgccacccagacggggaccatttacatcctcctgcagggctccactgtcttccatgatcgcagaagggaggaggtgatgacctttcaggcagcggttccgctcaactaccattacgcgtaccgcctcgacactggagaagccactcttacgaacgagccctcggaacagtttgccaacacattcatgcagatgacaccgttcactcactggaggctacgtctgtctgcgtccgcagcggagaataaaggattagcctttcccacagctacagctcccgactccaccactgagattgccatcactttccatgttacggccattagacaaattgactggcggcaagaggaggag

SEQ ID NO: 429 - DNA, 2559 bp, Artificial Sequence
  Synthetic
atggattacagcacgctttacagggatctgaaccagataagcatgcccctggatcgggtagagttctcagaggtgatggtaatccacaggatgtacttgaggttatctgatctgaatgtgggggagctccccggagccgagagggtgaagcggttgtatgtgttggcagacgtggtggagctcgcaacatttgcgcatccacagttgcttaatacgcggatgccaggatcggtgacggtgatcattctgtgtcgtcttcttcagtttccaactgatgggtcgttcgctgcttggctcgagctgccgttcatggagttgcacacactcatagaacaatacaggtcagagataaaagcagcagatgacgcgaaatggggaacgtatgtacacgcggaggaagtacagctcagcccgctgtttaatgggtggccttatctggttgttgaggcacagcgctgtattataaccgcggccatgcacaatacatttaaccgccctgggtgggttcgctccattactcaatttacaactgatcagtccggtcgggtagataccacactgctcgcacgaacagaattcggccatattgatctaccactcgaaacagattccccaacggcattcagtgtttcacaccgccaaagtacgaatttgcccgtagagtacaccggtattccagtggaggtggtgaccgatcctaacatcttgatgggcatgcaaaccagcgtgcacattgcggagctagtgaaggcatgttacccgtcaccagaattagtgagcgctgtaggggtgcacgtgaattggctcaacgaagtcttgctccgagttgtccagaaggaatctcagttgcaagggaccgaggcctacaacgagtgccttgcgcttttaggtcgcattcaatgtgtcatgaagatggggccgtttgtctcggtagtgccgcagctgcaatacagaatgtatggtagcctcatcagacaaatggcccaggtagcacaaaactacgaccgagaattcaagcaattcaaattattcatcatccaaaatcaaatccttggcagctatttgctgcagcagaacagggcatttgctgagagggagctgcagatggagagctttcatgctgctgtcatttctcaaagaagggaggagttggacaatacattcgcaaagatggaccgattgagcgggcaaatggaggcagagagtagtgcaatggagcaagccaaaaaggaaatggacgaaggattgaggcagttccagaataggcaagttgcaagggctgtgttcgctgttcttaaatctgtagctatgattgcgctcgcattcgtcacggctggtgcaacggctcctggggctgcagcatctgcagcgcaagctgtgaacatagccggtcaagcggcacaagctctgcgaagggtggtggaaattctagagcagctggaggctgtgatggaggttgtggctgctataaagcaccttgtggatgctctggaccaggtaagtcagattgtggatgcaccacctatgccagacatgccctcggaggcggactggagtatttttgtgaatgagattgaagccgtggcagaggggatgccgacggaagtctcggaggttccggtgtggagggccaagtgcaagaatgtggctgcactgggtcgggagatgagcatcacggcagtacagatgtcggagctgcagtatgacatctgggtgcaaggcatgatgcgggatatggctcgaagccaggcagacaggctggccgcaattcaacccgcggaccttaccaactatttggagatggctacccagatggatatgcggactacgaggatgctgctggggctcctcaacataatgcgcatccagaatgcggcacttatgtatgagtaccttctaacgcccacgcagctcactgcatggccgctgagaatggatactgtggccaacttgctcatcacgcacgagagtgctgcactgtcaggattagctcagttagggcccccatcggacttcacgagcaggcatgtagtgaaaggcatacctgtgagcttgcttctagacggtggggattgggaatttgagattcctgtgcaaggtggcatgtccagtttcccttccagctggactcgagtgcggattcggcacctggagatgcactttgtgaaggaggccagcggtattggtggtgagattatccaccagcctgccacccagacggggaccatttacatcctcctgcagggctccactgtcttccatgatcgcagaagggaggaggtgatgacctttcaggcagcggttccgctcaactaccattacgcgtaccgcctcgacactggagaagccactcttacgaacgagccctcggaacagtttgccaacacattcatgcagatgacaccgttcactcactggaggctacgtctgtctgcgtccgcagcggagaataaaggattagcctttcccacagctacagctcccgactccaccactgagattgccatcactttccatgttacggccattagacaaattgactggcggcaagaggaggag

SEQ ID NO: 430 - DNA, 2559 bp, Artificial Sequence
  Synthetic
atggattacagcacgctttacagggatctgaaccagataagcatgcccctggatcgggtagagttctcagaggtgatggtaatccacaggatgtacttgaggttatctgatctgaatgtgggggagctccccggagccgagagggtgaagcggttgtatgtgttggcagacgtggtggagctcgcaacatttgcgcatccacagttgcttaatacgcggatgccaggatcggtgacggtgatcattctgtgtcgtcttcttcagtttccaactgatgggtcgttcgctgcttggctcgagctgccgttcatggagttgcacacactcatagaacaatacaggtcagagataaaagcagcagatgacgcgaaatggggaacgtatgtacacgcggaggaagtacagctcagcccgctgtttaatgggtggccttatctggttgttgaggcacagcgctgtattataaccgcggccatgcacaatacatttaaccgccctgggtgggttcgctccattactcaatttacaactgatcagtccggtcgggtagataccacactgctcgcacgaacagaattcggccatattgatctaccactcgaaacagattccccaacggcattcagtgtttcacaccgccaaagtacgaatttgcccgtagagtacaccggtattccagtggaggtggtgaccgatcctaacatcttgatgggcatgcaaaccagcgtgcagattgcggagctagtgaaggcatgttacccgtcaccagaattagtgagcgctgtaggggtgcacgtgaattggctcaacgaagtcttgctccgagttgtccagaaggaatctcagttgcaagggaccgaggcctacaacgagtgccttgcgcttttaggtcgcattcaatgtgtcatgaagatggggccgtttgtctcggtagtgccgcagctgcaatacagaatgtatggtagcctcatcagacaaatggcccaggtagcacagaactacgaccaagatttcaggcagctcaagttattcattgcccaaaaccaaatccttggcagctatttgctgcagcagaacaaggcctttgctgacagagaggtgcagatggagagctttcattcagcggtcatttctcaaagaaggcaggagttggacgacgccatcgctaagatggaccgactgagcttgcagatggaggaagaggacagagcaatggagcaagcccgaaaagaaatggaagaaggattgaagcagttccagaatgagcaagttgcaagggctgtgttcgctgttcttaaatctgtagctatgattgcgctcgcattcgtcacggctggtgcaacggctcctggggctgcagcatctgcagcgcaagctgtgaacatagccggtcaagcggcacaagctctgcgaagggtggtggaaattctagaggggctcgaggctgtgatggaggttgtggctgctataaagcaccttgtggatgctctggaccaggtaagtcagattgtggatgcaccacctatgccagacatgccctcggaggcggactggagtatttttgtgaatgagattgaagccgtggcagaggggatgccgacggaagtctcggaggttccggcgtggaaggccaagtgcaagaatgtggctgcactgggtcgggagatgagcatcacggcagtacagatgtcggagctgcagtatgacatctgggtgcaaggcttgttgcgggatatagctcaaagccacgcagaccggctggcagcgattcaacctgctaatcttaccaactatttggagatggcaatacagatggatatgcggactacgaggatactgatagggctcctcaacataatgcgcatccagaatgcggcacttatgtatgagtaccttctaacgcccacgcagctcactgcatggccgctgagaatggatactgtggccaacttgctcatcacgcacgagagtgctgcactgtcaggattagctcagttagggcccccatcggacttcacgagcaggcatgtagtgaaaggcatacctgtgagcttgcttctagacggtggggattgggaatttgagattcctgtgcaaggtggcatgtccagtttcccttccagctggactcgagtgcggattcggcacctggagatgcactttgtgaaggaggccagcggtattggtggtgagattatccaccagcctaccacccagactgggaccgtttacatccttctgcagggttccactatcttccatgaccgcagaagagaccaggtgttgccttttcaggccgctgctccgctcaactaccattacgcgtaccgcctcgacactggagaagccactcttacgaacgagccctcggaacagtttgccaacacattcatgcagatgacaccgttcactcactggaggctacgtctgtctgcgtccgcagcggagaataaaggattagcctttcccacagctacagctcccgactccaccactgagattgccatcactttccatgttacggccattagacaaattgactggcggcaagaggaggag

SEQ ID NO: 431 - DNA, 2556 bp, Artificial Sequence
  Synthetic
atggattacagcacgctttacagggatctgaaccagataagcatgcccctggatcgggtagagttctcagaggtgatggtaatccacaggatgtacttgaggttatctgatctgaatgtgggggagctccccggagccgagagggtgaagcggttgtatgtgttggcagacgtggtggagctcgcaacatttgcgcatccacagttgcttaatacgcggatgccaggatcggtgacggtgatcattctgtgtcgtcttcttcagtttccaactgatgggtcgttcgctgcttggctcgagctgccgttcatggagttgcacacactcatagaacaatacaggtcagagataaaagcagcagatgacgcgaaatggggaacgtatgtacacgcggaggaagtacagctcagcccgctgtttaatgggtggccttatctggttgttgaggcacagcgctgtattataaccgcggccatgcacaatacatttaaccgccctgggtgggttcgctccattactcaatttacaactgatcagtccggtcgggtagataccacactgctcgcacgaacagaattcggccatattgatctaccactcgaaacagattccccaacggcattcagtgtttcacaccgccaaagtacgaatttgcccgtagagtacaccggtattccagtggaggtggtgaccgatcctaacatcttgatgggcatgcaaaccagcgtgcacattgcggagctagtgaaggcatgttacccgtcaccagaattagtgagcgctgtaggggtgcacgtgaattggctcaacgaagtcttgctccgagttgtccagaaggaatctcagttgcaagggaccgaggcctacaacgagtgccttgcgcttttaggtcgcattcaatgtgtcatgaagatggggccgtttgtctcggtagtgccgcagctgcaatacagaatgtatggtagcctcatcagacaaatggcccaggtagcacagaactacgaccaagatttcaggcagctcaagttattcattgcccaaaaccaaatccttggcagctatttgctgcagcagaacaaggcctttgctgacagagaggtgcagatggagagctttcattcagcggtcatttctcaaagaaggcaggagttggacgacgccatcgctaagatggaccgactgagcttgcagatggaggaagaggacagagcaatggagcaagcccgaaaagaaatggaagaaggattgaagcagttccagaatgagcaagttgcaagggctgtgttcgctgttcttaaatctgtagctatgattgcgctcgcattcgtcacggctggtgcaacggctcctggggctgcagcatctgcagcgcaagctgtgaacatagccggtcaagcggcacaagctctgcgaagggtggtggaaattctagagcagctggaggctgtgatggaggttgtggctgctgtgaaggacctcgtggattcattggaacaggtaggtcagattgtggacgcaccggtgatgccggaattgccctcagaggcggactggtccatttttgtgaacgaggtggaggccgtggcagagggcatgccaacggaagtctcggaggttccggtgtggagggccaagtgcaagaatgtggctgcactgggtcgggagatgagcatcacggcagtacagatgtcggagctccagtatgacatctgggtgcaaggcttgttgcgggatatagctcaaagccacgcagaccggctggcagcgattcaacctgctaatcttaccaactatttggagatggcaatacagatggatatgcggactacgaggatactgatagggctcctcaacataatgcgcatccagaatgcggcacttatgtatgagtaccttctaacgcccacgcagctcactgcatggccgctgagaatggatactgtggccaacttgctcatcacgcacgagagtgctgcactgtcaggattagctcagttagggcccccatcggacttcacgagcaggcatgtagtgaaaggcatacctgtgagcttgcttctagacggtggggattgggaatttgagattcctgtgcaagctggcatgtccagtttcccttccagctggactcgagtgcggattcggcacctggagatgcactttgtgcaggaggcgagcggtggcggcgagattatccaccagcctgccacccagacggggaccatttacatcctcctgcagggctccactgtcttccatgatcgcagaagggaggaggtgatgacctttcaggcagcggttccgctcaactaccattacgcgtaccgcctcgacactggagaagccactcttacgaacgagccctcggaacagtttgccaacacattcatgcagatgacaccgttcactcactggaggctacgtctgtctgcgtccgcagcggagaataaaggattagcctttcccacagctacagctcccgactccaccactgagattgccatcactttccatgttacggccattagacaaattgactggcggcaagaggaggag

SEQ ID NO: 432 - DNA, 2553 bp, Artificial Sequence
  Synthetic
atggattacagcacgctttacagggatctgaaccagataagcatgcccctggatcgggtagagttctcagaggtgatggtaatccacaggatgtacttgaggttatctgatctgaatgtgggggagctccccggagccgagagggtgaagcggttgtatgtgtttgcagacgtggtggagctcgcaacatttgcgcatccacagttgcttaatacgcggatgccaggatcggtgacggtgatcattctgtgtcgtcttcttcagtttccaactgatgggtcgttcgctgcttggctcgagctgccgttcatggagttgcacacactcatagaacaatacaggtcagagataaaagcagcagatgacgcgaaatggggaacgtatgtacacgcggaggaagtacagctcagcccgctgtttaatgggtggccttatctggttgttgaggcacagcgctgtattataaccgcggccatgcacaatacatttaaccgccctgggtgggttcgctccattactcaatttacaactgatcagtccggtcgggtagataccacactgctcgcacgaacagaattcggccatattgatctaccactcgaaacagattccccaacggcattcagtgtttcacaccgccaaagtacgaatttgcccgtagagtacaccggtattccagtggaggtggtgaccgatcctaacatcttgatgggcatgcagacaacggtacacattgcggagctagtcaaggcatgtcatccgtcacccgatgttgtgagcgctgtaggggagcacctgaactggctcaacaaactcttactcccacttaaggaatcgactcagttgcaaggaagcgagtcgtacaaggagtgccttgcactcttgggtcgtgttcacgctgcgatgaagatggtgagaattggcttagtagtgccccagctgcaatacagaatgtacggtagcctcatcaaccaaatggcccaagtagcacaaaactacgaccgagaattcaagcaattcaaattattcatcatccaaaatcaaatccttggcagctatttgctgcagcagaacagggcatttgctgagagggagctgcagatggagagctttcattcagcggtcatttctcaaagaaggcaggagttggacgacgccatcgctaagatggaccgactgagcttgcagatggaggaagaggacagagcaatggagcaagcccgaaaagaaatggaagaaggattgaagcagttccagaatgagcaagttgcaagggctgtgttcgctgttcttaaatctgtagctatgattgcgctcgcattcgtcacggctggtgcaacggctcctggagctgtggcgtcggcggggcaagctgtgagcatagcaggtcaggcggcgcaaggtctgcgaagggtggtggaaattctagaggggctcgaggctgtgatggaggttgtggctgctataaagcaccttgtggatgctctggaccaggtaagtcagattgtggatgcaccacctatgccagacatgccctcggaggcggactggagtatttttgtgaatgagattgaagccgtggcagaggggatgccgacggaagtctcggaggttccggcgtggaaggccaagtgcaagaatgtggctgcactgggtagggagatgtgcatcacggcagaacagatttcccagctccagtatgacatctgggtgcaaggcttgttgcgggatatagctcaaagccacgcagaccggctggcagcgattcaacctgctaatcttaccaactatttggagatggcaatacagatggatatgcggactacgaggatactgatagggctcctcaacataatgcgcatccagaatgcggcacttatgtatgagtaccttctaacgcccacgcagctcactgcatggccgctgagaatggatactgtggccaacttgctcatcacgcacgagagtgctgcactgtcaggattagctcagttagggcccccatcggacttcacgagcaggcatgtagtgaaaggcatacctgtgagcttgcttctagacggtggggattgggaatttgagattcctgtgcaaggtggcatgtccagtttcccttccagctggactcgagtgcggattcggcacctggagatgcactttgtgcaggaggcgagcggtggcggcgagattatccaccagcctgccacccagacggggaccatttacatcctcctgcagggttccactatcttccatgaccgcagaagagaccaggtgttgccttttcaggccgctgctccgctcaactaccattacgcgtaccgcctcgacaccggcgactccactctcacaaacgaaccctctgaacagtttgccaacaagttcatgcagatgacacccttcacccgttggaggcttcgtctgtctgcgtccgcagcggagaataaaggattagcctttcccacagctacagctcccgactccaccactgagattgccatcactttccatgttacggccattagacaaattgactggcggcaagaggaggag

SEQ ID NO: 433 - DNA, 2563 bp, Artificial Sequence
  Synthetic
atggattacagcacgctttacagggatctgaaccagataagcatgcccctggatcgggtagagttctcagaggtgatggtaatccacaggatgtacttgaggttatctgatctgaatgtgggggagctccccggagccgagagggtgaagcggttgtatgtgttggcagacgtggtggagctcgcaacatttgcgcatccacagttgcttaatacgcggatgccaggatcggtgacggtgatcattctgtgtcgtcttcttcagtttccaactgatgggtcgttcgctgcttggctcgagctgccgttcatggagttgcacacactcatagaacaatacaggtcagagataaaagcagcagatgacgcgaaatggggaacgtatgtacacgcggaggaagtacagctcagcccgctgtttaatgggtggccttatctggttgttgaggcacagcgctgtattataaccgcggccatgcacaatacatttaaccgccctgggtgggttcgctccattactcaatttacaactgatcagtccggtcgggtagataccacactgctcgcacgaacagaattcggccatattgatctaccactcgaaacagattccccaacggcattcagtgtttcacaccgccaaagtacgaatttgcccgtagagtacaccggtattccagtggaggtggtgaccgatcctaacatcttgatgggcatgcaaaccagcgtgcacattgcggagctagtcaaggcatgtcatccgtcacccgatgttgtgagcgctgtaggggtgcacgtgaattggctcaacgaagtcttgctccgagttgtccagaaggaatctcagttgcaagggaccgaggcctacaacgagtgccttgcgcttttaggtcgcattcaatgtgtcatgaagatggggccgtttgtctcggtagtgccgcagctgcaatacagaatgtatggtagcctcatcagacaaatggcccaggtagcacagaactacgaccaagatttcaggcagctcaagttattcattgcccaaaaccaaatccttggcagctatttgctgcagcagaacaaggcctttgctgacagagaggtgcagatggagagctttcattcagcggtcatttctcaaagaaggcaggagttggacgacgccatcgctaagatggaccgactgagcttgcagatggaggaagaggacagagcaatggagcaagcccgaaaagaaatggaagaaggattgaagcagttccagaatgagcaagttgcaagggctgtgttcgctgttcttaaatctgtagctatgattgcgctcgcattcgtcacggctggtgcaacggctcctggggctgcagcatctgcagcgcaagctgtgaacatagccggtcaagcggcacaagctctgcgaagggtggtggaaattctagagcagctggaggctgtgatggaggttgtggctgctgtgaaggacctcgtggattcattggaccaggtaggtcagattgtggacgcaccggtgatgccggaattgccctcagaggcggactggtccatttttgtgaacgaggtggaggccgtggcagaggggatgccgacggaagtctcggaggttccggcgtggaaggccaagtgcaagaatgtggctgcactgggtagggagatgtgcatcacggcagaacagatttcccagctccagtatgacatctgggtgcaaggcttgttgcgggatatagctcaaagccacgcagaccggctggcagcgattcaacctgctaatcttaccaactatttggagatggcaatacagatggatatgcggactacgaggatactgatagggctcctcaacataatgcgcatccagaatgcggcacttatgtatgagtaccttctaacgcccacgcagctcactgcatggccgctgagaatggatactgtggccaacttgctcatcacgcacgagagtgctgcactgtcaggattagctcagttagggcccccatcggacttcacgagcaggcatgtggtgaaagacatacctgtgaacttgctgctcgatggcgaggattgggagtttgagattcctgtgcaagctggcatgtccagcttcccttccagctggtctcgcgtccgtattcggcacctggagatgcactttgtgaaggaggccagcggtattggtggtgagattatccaccagcctaccacccagactgggaccgtttacatccttctgcagggttccactatcttccatgaccgcagaagagaccaggtgttgccttttcaggccgctgctccgctcaactaccattacgcgtaccgcctcgacaccggcgactccactctcacaaacgaaccctctgaacagtttgccaacaagttcatgcagatgacacccttcacccgttggaggcttcgtctgtctgcgtccgcaaaagagaatgcaggattagcctttcccacggctacagcacttgactccactacccagattgtcatcactttccatgttacggccatcagacaaattgactggcggcacgacgaagagtagc

SEQ ID NO: 434 - DNA, 2559 bp, Artificial Sequence
  Synthetic
atggattacagcacgctttacagggatctgaaccagataagcatgcccctggatcgggtagagttctcagaggtgatggtaatccacaggatgtacttgaggttatctgatctgaatgtgggggagctccccggagccgagaaagtgaagcggttgtatgtgttggcggacgtggtggagctcgcaacatttgcgcatccacagttgcttaatacgcggatgccaggatcggtgacggtgatcattctgtgtcgtcttcttcagtttccaactgatgggtcgttcgctgcttggctcgagctgccgttcatggagttgcacacactcatagaacaatacaggtcagagataaaagcagcagatgacgcgaaatggggaacgtatgtacacgcggaggaagtacagctcagcccgctgtttaatgggtggccttatctggttgttgaggcacagcgctgtattataaccgcggccatgcacaatacatttaaccgccctgggtgggttcgctccattactcaatttacaactgatcagtccggtcgggtagataccacactgctcgcacgaacagaattcggccatattgatctaccactcgaaacagattccccaacggcattcagtgtttcacaccgccaaagtacgaatttgcccgtagagtacaccggtattccagtggaggtggtgaccgatcctaacatcttgatgggcatgcaaaccagcgtgcacattgcggagctagtgaaggcatgttacccgtcaccagaattagtgagcgctgtaggggtgcacgtgaattggctcaacgaagtcttgctccgagttgtccagaaggaatctcagttgcaagggaccgaggcctacaacgagtgccttgcgcttttaggtcgcattcaatgtgtcatgaagatggggccgtttgtctcggtagtgccgcagctgcaatacagaatgtatggtagcctcatcagacaaatggcccaggtagcacagaactacgaccaagatttcaggcagctcaagttattcattgcccaaaaccaaatccttggcagctatttgctgcagcagaacaaggcctttgctgacagagaggtgcagatggagagctttcattcagcggtcatttctcaaagaaggcaggagttggacgacgccatcgctaagatggaccgactgagcttgcagatggaggaagaggacagagcaatggagcaagccaaaaaggaaatggacgaaggattgaggcagttccagaataggcaagttgcgaacgccctctttgccgttcttagcgctgtagctcagattgggcttgcattccttacggctggtgcaacggctcctggagctgtggcgtcggcggggcaagctgtgagcatagcaggtcaggcggcgcaaggtctgcgaagggtggtggaaattctagagcagctggaggctgtgatggaggttgtggctgctataaagcaccttgtggatgctctggaccaggtaagtcagattgtggatgcaccacctatgccagacatgccctcggaggcggactggagtatttttgtgaatgagattgaagccgtggcagaggggatgccgacggaagtctcggaggttccggcgtggaaggccaagtgcaagaatgtggctgcactgggtagggagatgtgcatcacggcagaacagatttcccagctccagtatgacatctgggtgcaaggcttgttgcgggatatagctcaaagccaggcagacaggctggccgcaattcaacccgcggaccttaccaactatttggagatggctacccagatggatatgcggactacgaggatgctgctggggctcctcaacatattgcgcatccagaatgcggcgctcaggtacgagtatcttctaatgcccacggagctcacaacatggccactgggtatggataccgtgggtgacttgctcatcgcgcaggagaatgctgcactgataggattaatgcagctagggccctcatctgatttcacgagcaggcatgtggtgaaagacatacctgtgaacttgctgctcgatggcgaggattgggagtttgagattcctgtgcaagctggcatgtccagcttcccttccagctggtctcgcgtccgtattcggcacctggagatgcactttgtgaaggaggccagcggtattggtggtgagattatccaccagcctaccacccagactgggaccgtttacatccttctgcagggttccactatcttccatgaccgcagaagagaccaggtgttgccttttcaggccgctgctccgctcaactaccattacgcgtaccgcctcgacactggagaagccactcttacgaacgagccctcggaacagtttgccaacacattcatgcagatgacaccgttcactcactggaggctacgtctgtctgcgtccgcagcggagaataaaggattagcctttcccacagctacagctcccgactccaccactgagattgccatcactttccatgttacggccattagacaaattgactggcggcaagaggaggag

SEQ ID NO: 435 - DNA, 2559 bp, Artificial Sequence
  Synthetic
atggattacagcacgctttacagggatctgaaccagataagcatgcccctggatcgggtagagttctcagaggtgatggtaatccacaggatgtatgtgaggctagctgatctgaatgtgggggagctccccggagccgagaaagtgaagcggttgtatgtgttggcagacgtggtggagctcgcaacatttgcgcatccacagttgcttaatacgcggatgccaggatcggtgacggtgatcattctgtgtcgtcttcttcagtttccaactgatgggtcgttcgctgcttggctcgagctgccgttcatggagttgcacacactcatagaacaatacaggtcagagataaaagcagcagatgacgcgaaatggggaacgtatgtacacgcggaggaagtacagctcagcccgctgtttaatgggtggccttatctggttgttgaggcacagcgctgtattataaccgcggccatgcacaatacatttaaccgccctgggtgggttcgctccattactcaatttacaactgatcagtccggtcgggtagataccacactgctcgcacgaacagaattcggccatattgatctaccactcgaaacagattccccaacggcattcagtgtttcacaccgccaaagtacgaatttgcccgtagagtacaccggtattccagtggaggtggtgaccgatcctaacatcttgatgggcatgcaaaccagcgtgcacattgcggagctagtgaaggcatgttacccgtcaccagaattagtgagcgctgtaggggtgcacgtgaattggctcaacgaagtcttgctccgagttgtccagaaggaatctcagttgcaagggaccgaggcctacaacgagtgccttgcgcttttaggtcgcattcaatgtgtcatgaagatggggccgtttgtctcggtagtgccgcagctgcaatacagaatgtatggtagcctcatcagacaaatggcccaggtagcacagaactacgaccaagatttcaggcagctcaagttattcattgcccaaaaccaaatccttggcagctatttgctgcagcagaacaaggcctttgctgacagagaggtgcagatggagagctttcattcagcggtcatttctcaaagaaggcaggagttggacgacgccatcgctaagatggaccgactgagcttgcagatggaggaagaggacagagcaatggagcaagcccgaaaagaaatggaagaaggattgaagcagttccagaatgagcaagttgcaagggctgtgttcgctgttcttaaatctgtagctatgattgcgctcgcattcgtcacggctggtgcaacggctcctggggctgcagcatctgcagcgcaagctgtgaacatagccggtcaagcggcacaagctctgcgaagggtggtggaaattctagagcagctggaggctgtgatggaggttgtggctgctgtgaaggacctcgtggattcattggaacaggtaggtcagattgtggacgcaccggtgatgccggaattgccctcagaggcggactggtccatttttgtgaacgaggtggaggccgtggcagagggcatgccaacggaagtctcggaggttccggcgtggaaggccaagtgcaagaatgtggctgcactgggtagggagatgagcatcacggcagaacagatttcccagctccagtatgacatctgggtgcaaggcttgttgcgggatatagctcaaagccacgcagaccggctggcagcgattcaacctgctaatcttaccaactatttggagatggcaatacagatggatatgcggactacgaggatactgatagggctcctcaacataatgcgcatccagaatgcggcacttatgtatgagtaccttctaacgcccacgcagctcactgcatggccgctgagaatggatactgtggccaacttgctcatcacgcacgagagtgctgcactgtcaggattagctcagttagggcccccatcggacttcacgagcaggcatgtagtgaaaggcatacctgtgagcttgcttctagacggtggggattgggaatttgagattcctgtgcaaggtggcatgtccagtttcccttccagctggactcgagtgcggattcggcacctggagatgcactttgtgaaggaggccagcggtattggtggtgagattatccaccagcctaccacccagacggggaccatttacatcctcctgcagggctccactgtcttccatgatcgcagaagggaggaggtgatgacctttcaggcagcggttccgctcaactaccattacgcgtaccgcctcgacaccggcgactccactctcacaaacgaaccctctgaacagtttgccaacaagttcatgcagatgacacccttcacccgttggaggcttcgtctgtctgcgtccgcaaaagagaatgcaggattagcctttcccacggctacagcacttgactccactacccagattgtcatcactttccatgttacggccatcagacaaattgactggcggcacgacgaagag

SEQ ID NO: 436 - DNA, 2556 bp, Artificial Sequence
  Synthetic
atggattacagcacgctttacagggatctgaaccagataagcatgcccctggatcgggtagagttctcagaggtgatggtaatccacaggatgtacttgaggttatctgatctgaatgtgggggagctccccggagccgagagggtgaagcggttgtatgtgttggcagacgtggtggagctcgcaacatttgcgcatccacagttgcttaatacgcggatgccaggatcggtgacggtgatcattctgtgtcgtcttcttcagtttccaactgatgggtcgttcgctgcttggctcgagctgccgttcatggagttgcacacactcatagaacaatacaggtcagagataaaagcagcagatgacgcgaaatggggaacgtatgtacacgcggaggaagtacagctcagcccgctgtttaatgggtggccttatctggttgttgaggcacagcgctgtattataaccgcggccatgcacaatacatttaaccgccctgggtgggttcgctccattactcaatttacaactgatcagtccggtcgggtagataccacactgctcgcacgaacagaattcggccatattgatctaccactcgaaacagattccccaacggcattcagtgtttcacaccgccaaagtacgaatttgcccgtagagtacaccggtattccagtggaggtggtgaccgatcctaacatcttgctgggcatgcaaaccagcgtgcacattgcggagctagtgaaggcatgttacccgtcaccagaattagtgagcgctgtaggggtgcacgtgaattggctcaacaaactcttactcccacttaaggaatcgactcagttgcaaggaagcgagtcgtacaaggagtgccttgcactcttgggtcgtgttcacgctgcgatgaagatggtgagaattggcttagtagtgccccagctgcaatacagaatgtacggtagcctcatcaaccaaatggcccaagtagcacaaaactacgaccgagaattcaagcagctcaagttattcattgcccaaaaccaaatccttggcagctatttgctgcagcagaacagggcatttgctgagagggagctgcagatggagagctttcattcagcggtcatttctcaaagaaggcaggagttggacgacgccatcgctaagatggaccgactgagcttgcagatggaggaagaggacagagcaatggagcaagcccgaaaagaaatggaagaaggattgaagcagttccagaatgagcaagttgcaagggctgtgttcgctgttcttaaatctgtagctatgattgcgctcgcattcgtcacggctggtgcaacggctcctggggctgcagcatctgcagcgcaagctgtgaacatagccggtcaagcggcacaagctctgcgaagggtggtggaaattctagaggggctcgaggctgtgatggaggttgtggctgctataaagcaccttgtggatgctctggaccaggtaagtcagattgtggatgcaccacctatgccagacatgccctcggaggcggactggagtatttttgtgaatgagattgaagccgtggcagaggggatgccgacggaagtctcggaggttccggcgtggaaggccaagtgcaagaatgtggctgcactgggtagggagatgtgcatcacggcagaacagatttcccagctccagtatgacatctgggtgcaaggcttgttgcgggatatagctcaaagccacgcagaccggctggcagcgattcaacctgctaatcttaccaactatttggagatggcaatacagatggatatgcggactacgaggatactgatagggctcctcaacataatgcgcatccagaatgcggcacttatgtatgagtaccttctaacgcccacgcagctcactgcatggccgctgagaatggatactgtggccaacttgctcatcacgcacgagagtgctgcactgtcaggattagctcagttagggcccccatcggacttcacgagcaggcatgtagtgaaaggcatacctgtgagcttgcttctagacggtggggattgggaatttgagattcctgtgcaaggtggcatgtccagtttcccttccagctggactcgagtgcggattcggcacctggagatgcactttgtgcaggaggccagcggtattggtggtgagattatccaccagcctgccacccagactgggaccatttacatcctcctgcagggctccactgtcttccatgatcgcagaagggaggaggtgatgacctttcaggcagcggttccgctcaactaccattacgcgtaccgcctcgacactggagaagccactcttacgaacgagccctcggaacagtttgccaacacattcatgcagatgacaccgttcactcactggaggctacgtctgtctgcgtccgcagcggagaataaaggattagcctttcccacagctacagctcccgactccaccactgagattgccatcactttccatgttacggccattagacaaattgactggcggcaagaggaggag

SEQ ID NO: 437 - DNA, 2502 bp, Artificial Sequence
  Synthetic
atggattacagcacgctttacagggatctgaaccagataagcatgcccctggatcgggtagagttctcagaggtgatggtaatccacaggatgtacttgaggttatctgatctgaatgtgggggagctccccggagccgagagggtgaagcggttgtatgtgttggcagacgtggtggagctcgcaacatttgcgcatccacagttgcttaatacgcggatgccaggatcggtgacggtgatcattctgtgtcgtcttcttcagtttccaactgatgggtcgttcgctgcttggctcgagctgccgttcatggagttgcacacactcatagaacaatacaggtcagagataaaagcagcagatgacgcgaaatggggaacgtatgtacacgcggaggaagtacagctcagcccgctgtttaatgggtggccttatctggttgttgaggcacagcgctgtattataaccgcggccatgcacaatacatttaaccgccctgggtgggttcgctccattactcaatttacaactgatcagtccggtcgggtagataccacactgctcgcacgaacagaattcggccatattgatctaccactcgaaacagattccccaacggcattcagtgtttcacaccgccaaagtacgaatttgcccgtagagtacaccggtattccagtggaggtggtgaccgatcctaacatcttgatgggcatgcaaaccagcgtgcacattgcggagctagtgaaggcatgttacccgtcaccagaattagtgagcgctgtaggggtgcacgtgaattggctcaacgaagtcttgctccgagttgtccagaaggaatctcagttgcaagggaccgaggcctacaacgagtgccttgcgcttttaggtcgcattcaatgtgtcatgaagatggggccgtttgtctcggtagtgccgcagctgcaatacagaatgtatggtagcctcatcagacaaatggcccaggtagcacagaactacgaccaagatttcaggcagctcaagttattcattgcccaaaaccaaatccttggcagctatttgctgcagcagaacaaggcctttgctgacagagaggtgcagatggagagctttcattcagcggtcatttctcaaagaaggcaggagttggacgacgccatcgctaagatggaccgactgagcttgcagatggaggaagaggacagagcaatggagcaagcccgaaaagaaatggaagaaggattgaagcagttccagaatgagcaagttgcaagggctatgttcacagcttgcgctgcagatgctgcagcgcaagctgtgagcatagcaggtcaggcggcgcaaggtctgcgaagggtggtggaaattctagagcagctggaggctgtgatggaggttgtggctgctataaagcaccttgtggatgctctggaccaggtaagtcagattgtggacgcaccggtgatgccggaattgccctcagaggcggactggtccatttttgtgaacgaggtggaggccgtggcagagggcatgccaacggaagtctcggaggttccggtgtggagggccaagtgcaagaatgtggctgcactgggtagggagatgtgcatcacggcagaacagatttcccagctccagtatgacatctgggtgcaaggcttgttgcgggatatagctcaaagccacgcagaccggctggcagcgattcaacctgctaatcttaccaactatttggagatggcaatacagatggatatgcggactacgaggatactgatagggctcctcaacataatgcgcatccagaatgcggcacttatgtatgagtaccttctaacgcccacggagctcacaacatggccactgggtatggataccgtgggtgacttgctcatcgcgcaggagaatgctgcactgataggattaatgcagctagggccctcatctgatttcacgagcaggcatgtggtgaaagacatacctgtgaacttgctgctcgatggcgaggattgggagtttgagattcctgtgcaagctggcatgtccagcttcccttccagctggtctcgcgtccgtattcggcacctggagatgcactttgtgaaggaggccagcggtattggtggtgagattatccaccagcctaccacccagactgggaccgtttacatccttctgcagggttccactatcttccatgaccgcagaagagaccaggtgttgccttttcaggccgctgctccgctcaactaccattacgcgtaccgcctcgacactggagaagccactcttacgaacgagccctcggaacagtttgccaacacattcatgcagatgacaccgttcactcactggaggctacgtctgtctgcgtccgcagcggagaataaaggattagcctttcccacagctacagctcccgactccaccactgagattgccatcactttccatgttacggccattagacaaattgactggcggcaagaggaggag

SEQ ID NO: 438 - DNA, 2559 bp, Artificial Sequence
  Synthetic
atggattacagcacgctttacagggatctgaaccagataagcatgcccctggatcgggtagagttctcagaggtgatggtaatccacaggatgtacttgaggttatctgatctgaatgtgggggagctccccggagccgagagggtgaagcggttgtatgtgttggcagacgtggtggagctcgcaacatttgcgcatccacagttgcttaatacgcggatgccaggatcggtgacggtgatcattctgtgtcgtcttcttcagtttccaactgatgggtcgttcgctgcttggctcgagctgccgttcatggagttgcacacactcatagaacaatacaggtcagagataaaagcagcagatgacgcgaaatggggaacgtatgtacacgcagaggaagtacagctcagcccgctgtttaatgggtggccttatctggttgttgaggcacagcgctgtattataaccgcggccatgcacaatacatttaaccgccctgggtgggttcgctccattactcaatttacaactgatcagtccggtcgggtagataccacactgctcgcacgaacagaattcggccatattgatctaccactcgaaacagattccccaacggcattcagtgtttcacaccgccaaagtacgaatttgcccgtagagtacaccggtattccagtggaggtggtgaccgatcctaacatcttgatgggcatgcaaaccagcgtgcacattgcggagctagtgaaggcatgttacccgtcaccagaattagtgagcgctgtaggggtgcacgtgaattggctcaacgaagtcttgctccgagttgtccagaaggaatctcagttgcaagggaccgaggcctacaacgagtgccttgcgcttttaggtcgcattcaatgtgtcatgaagatggtgagaattggcttagtagtgccccagctgcaatacagaatgtacggtagcctcatcaaccaaatggcccaagtagcacaaaactacgaccgagaattcaagcaattcaaattattcatcatccaaaatcaaatccttggcagctatttgctgcagcagaacagggcatttgctgagagggagctgcagatggagagctttcatgctgctgtcatttctcaaagaagggaggagttggacaatacattcgcaaagatggaccgattgagcgggcaaatggaggcagagagtagtgcaatggagcaagccaaaaaggaaatggacgaaggattgaggcagttccagaataggcaagttgcgaacgccctctttgccgttcttagcgctgtagctcagattgggcttgcattccttacggctggtgcaacggctcctggggctgtggcgtcggcggggcaagctgtgagcatagcaggtcaggcggcgcaaggtctgcgaagggtggtggaaattctagagcagctggaggctgtgatggaggttgtggctgctgtgaaggacctcgtggattcattggaacaggtaggtcagattgtggacgcaccggtgatgccggaattgccctcagaggcggactggagtatttttgtgaatgagattgaagccgtggcagaggggatgccgacggaagtctcggaggttccggcgtggaaggccaagtgcaagaatgtggctgcactgggtagggagatgtgcatcacggcagaacagatttcccagctccagtatgacatctgggtgcaaggcttgttgcgggatatagctcaaagccacgcagaccggctggcagcgattcaacctgctaatcttaccaactatttggagatggcaatacagatggatatgcggactacgaggatactgatagggctcctcaacataatgcgcatccagaatgcggcacttatgtatgagtaccttctaacgcccacggagctcacaacatggccactgggtatggataccgtgggtgacttgctcatcgcgcaggagaatgctgcactgataggattaatgcagctagggccctcatctgatttcacgagcaggcatgtggtgaaagacatacctgtgaacttgctgctcgatggcgaggattgggagtttgagattcctgtgcaagctggcatgtccagcttcccttccagctggtctcgcgtccgtattcggcacctggagatgcactttgtgaaggaggccagcggtattggtggtgagattatccaccagcctaccacccagactgggaccgtttacatccttctgcagggttccactatcttccatgaccgcagaagagaccaggtgttgccttttcaggccgctgctccgctcaactaccattacgcgtaccgcctcgacaccggcgactccactctcacaaacgaaccctctgaacagtttgccaacaagttcatgcagatgacacccttcacccgttggaggcttcgtctgtctgcgtccgcaaaagagaatgcaggattagcctttcccacggctacagcacttgactccactacccagattgtcatcactttccatgttacggccatcagacaaattgactggcggcacgacgaagag

SEQ ID NO: 439 - DNA, 2559 bp, Artificial Sequence
  Synthetic
atggattacagcacgctttacagggatctgaaccagataagcatgcccctggatcgggtagagttctcagaggtgatggtaatccacaggatgtacttgaggttatctgatctgaatgtgggggagctccccggagccgagaaagtgaagcggttgtatgtgttggcagacgtggtggagctcgcaacatttgcgcatccacagttgcttaatacgcggatgccaggatcggtgacggtgatcattctgtgtcgtcttcttcagtttccaactgatgggtcgttcgctgcttggctcgagctgccgttcatggagttgcacacactcatagaacaatacaggtcagagataaaagcagcagatgacgcgaaatggggaacgtatgtacacgcggaggaagtacagctcagcccgctgtttaatgggtggccttatctggttgttgaggcacagcgctgtattataaccgcggccatgcacaatacatttaaccgccctgggtgggttcgctccattactcaatttacaactgatcagtccggtcgggtagataccacactgctcgcacgaacagaattcggccatattgatctaccactcgaaacagattccccaacggcattcagtgtttcacaccgccaaagtacgaatttgcccgtagagtacaccggtattccagtggaggtggtgaccgatcctaacatcttgatgggcatgcaaaccagcgtgcacattgcggagctagtgaaggcatgttacccgtcaccagaattagtgagcgctgtaggggtgcacgtgaattggctcaacgaagtcttgctccgagttgtccagaaggaatctcagttgcaagggaccgaggcctacaacgagtgccttgcgcttttaggtcgcattcaatgtgtcatgaagatggggccgtttgtctcggtagtgccgcagctgcaatacagaatgtatggtagcctcatcagacaaatggcccaggtagcacagaactacgaccaagatttcaggcagctcaagttattcattgcccaaaaccaaatccttggcagctatttgctgcagcagaacagggcatttgctgagagggagctgcagatggagagctttcatgctgctgtcatttctcaaagaagggaggagttggacaatacattcgcaaagatggaccgattgagcgggcaaatggaggcagagagtagtgcaatggagcaagccaaaaaggaaatggacgaaggattgaggcagttccagaataggcaagttgcgaacgccctctttgccgttcttagcgctgtagctcagattgggcttgcattccttacggctggtgcaacggctcctggagctgtggcgtcggcggggcaagctgtgagcatagcaggtcaggcggcgcaaggtctgcgaagggtggtggaaattctagagcagctggaggctgtgatggaggttgtggctgctgtgaaggacctcgtggattcattggaacaggtaggtcagattgtggacgcaccggtgatgccggaattgccctcagaggcggactggtccatttttgtgaacgaggtggaggccgtggcagagggcatgccaacggaagtctcggaggttccggtgtggagggccaagtgcaagaatgtggctgcactgggtagggagatgtgcatcacggcagaacagatttcccagctccagtatgacatctgggtgcaaggcttgttgcgggatatagctcaaagccacgcagaccggctggccgcaattcaacccgcggaccttaccaactatttggagatggctacccagatggatatgcggactacgaggatgctgctggggctcctcaacatattgcgcatccagaatgcggcgctcaggtacgagtatcttctaatgcccacggagctcacaacatggccactgggtatggataccgtgggtgacttgctcatcgcgcaggagaatgctgcactgataggattaatgcagctagggccctcatctgatttcacgagcaggcatgtggtgaaagacatacctgtgaacttgctgctcgatggcgaggattgggagtttgagattcctgtgcaagctggcatgtccagcttcccttccagctggtctcgcgtccgtattcggcacctggagatgcactttgtgaaggaggccagcggtattggtggtgagattatccaccagcctaccacccagactgggaccgtttacatccttctgcagggttccactatcttccatgaccgcagaagagaccaggtgttgccttttcaggccgctgctccgctcaactaccattacgcgtaccgcctcgacaccggcgactccactctcacaaacgaaccctctgaacagtttgccaacaagttcatgcagatgacacccttcacccgttggaggcttcgtctgtctgcgtccgcagcggagaataaaggattagcctttcccacagctacagctcccgactccaccactgagattgccatcactttccatgttacggccattagacaaattgactggcggcaagaggaggag

SEQ ID NO: 440 - DNA, 2559 bp, Artificial Sequence
  Synthetic
atggattacagcacgctttacagggatctgaaccagataagcatgcccctggatcgggtagagttctcagaggtgatggtaatccacaggatgtacttgaggttatctgatctgaatgtgggggagctccccggagccgagagggtgaagcggttgtatgtgttggcagacgtggtggagctcgcaacatttgcgcatccacagttgcttaatacgcggatgccaggatcggtgacggtgatcatattgtgtcgtcttcttcagtttccaactgatgggtcgttcgctgcttggctcgagctgccgttcatggagttgcacacactcatagaacaatacaggtcagagataaaagcagcagatgacgcgaaatggggaacgtatgtacacgcggaggaagtacagctcagcccgctgtttaatgggtggccttatctggttgttgaggcacagcgctgtattataaccgcggccatgcacaatacatttaaccgccctgggtgggttcgctccattactcaatttacaactgatcagtccggtcgggtagataccacactgctcgcacgaacagaattcggccatattgatctaccactcgaaacagattccccaacggcattcagtgtttcacaccgccaaagtacgaatttgcccgtagagtacaccggtattccagtggaggtggtgaccgatcctaacatcttgatgggcatgcaaaccagcgtgcacattgcggagctagtgaaggcatgttacccgtcaccagaattagtgagcgctgtaggggagcacgtgaattggctcaacgaagtcttgctccgagttgtccagaaggaatctcagttgcaagggaccgaggcctacaacgagtgccttgcgcttttaggtcgcattcaatgtgtcatgaagatggggccgtttgtctcggtagtgccgcagctgcaatacagaatgtacggtagcctcatcaaccaaatggcccaagtagcacaaaactacgaccgagaattcaagcaattcaaattattcatcatccaaaatcaaatccttggcagctatttgctgcagcagaacagggcatttgctgagagggagctgcagatggagagctttcatgctgctgtcatttctcaaagaagggaggagttggacaatacattcgcaaagatggaccgattgagcgggcaaatggaggcagagagtagtgcaatggagcaagccaaaaaggaaatggacgaaggattgaggcagttccagaataggcaagttgcgaacgccctctttgccgttcttagcgctgtagctcagattgggcttgcattccttacggctggtgcaacggctcctggagctgtggcgtcggcggggcaagctgtgagcatagcaggtcaggcggcgcaaggtctgcgaagggtggtggaaattctagaggggctcgaggctgtgatggaggttgtggctgctgtgaaggacctcgtggattcattggaacaggtaggtcagattgtggacgcaccggtgatgccggaattgccctcagaggcggactggtccatttttgtgaacgaggtggaggccgtggcagagggcatgccaacggaagtctcggaggttccggtgtggagggccaagtgcaagaatgtggctgcactgggtagggagatgtgcatcacggcagaacagatttcccagctccagtatgacatctgggtgcaaggcttgttgcgggatatagctcaaagccacgcagaccggctggcagcgattcaacctgctaatcttaccaactatttggagatggctacccagatggatatgcggactacgaggatgctgctggggctcctcaacatattgcgcatccagaatgcggcgctcaggtacgagtatcttctaatgcccacggagctcacaacatggccactgggtatggataccgtgggtgacttgctcatcgcgcaggagaatgctgcactgataggattaatgcagctagggccctcatctgatttcacgagcaggcatgtggtgaaagacatacctgtgaacttgctgctcgatggcgaggattgggagtttgagattcctgtgcaagctggcatgtccagcttcccttccagctggtctcgcgtccgtattcggcacctggagatgcactttgtgaaggaggccagcggtattggtggtgagattatccaccagcctaccacccagactgggaccgtttacatccttctgcagggttccactatcttccatgaccgcagaagagaccaggtgttgccttttcaggccgctgctccgctcaactaccattacgcgtaccgcctcgacaccggcgactccactctcacaaacgaaccctctgaacagtttgccaacaagttcatgcagatgacacccttcacccgttggaggcttcgtctgtctgcgtccgcaaaagagaatgcaggattagcctttcccacggctacagcacttgactccactacccagattgtcatcactttccatgttacggccatcagacaaattgactggcggcacgacgaagag

SEQ ID NO: 441 - DNA, 2559 bp, Artificial Sequence
  Synthetic
atggattacagcacgctttacagggatctgaaccagataagcatgcccctggatcgggtagagttctcagaggtgatggtaatccacaggatgtacttgaggttatctgatctgaatgtgggggagctccccggagccgagagggtgaagcggttgtatgtgttggcagacgtggtggagctcgcaacatttgcgcatccacagttgcttaatacgcggatgccaggatcggtgacggtgatcattctgtgtcgtcttcttcagtttccaactgatgggtcgttcgctgcttggctcgagctgccgttcatggagttgcacacactcatagaacaatacaggtcagagataaaagcagcagatgacgcgaaatggggaacgtatgtacacgcggaggaagtacagctcagcccgctgtttaatgggtggccttatctggttgttgaggcacagcgctgtattataaccgcggccatgcacaatacatttaaccgccctgggtgggttcgctccattactcaatttacaactgatcagtccggtcgggtagataccacactgctcgcacgaacagaattcggccatattgatctaccactcgaaacagattccccaacggcattcagtgtttcacaccgccaaagtacgaatttgcccgtagagtacaccggtattccagtggaggtggtgaccgatcctaacatcttgatgggcatgcaaaccagcgtgcacattgcggagctagtgaaggcatgttacccgtcaccagaattagtgagcgctgtaggggtgcacgtgaattggctcaacgaagtcttgctccgagttgtccagaaggaatctcagttgcaagggaccgaggcctacaacgagtgccttgcgcttttaggtcgcattcaatgtgtcatgaagatggggccgtttgtctcggtagtgccgcagctgcaatacagaatgtatggtagcctcatcagacaaatggcccaggtagcacagaactacgaccaagatttcaggcagctcaagttattcattgcccaaaaccaaatccttggcagctatttgctgcagcagaacaaggcctttgctgacagagaggtgcagatggagagctttcattcagcggtcatttctcaaagaaggcaggagttggacgacgccatcgctaagatggaccgactgagcttgcagatggaggaagaggacagagcaatggagcaagcccgaaaagaaatggaagaaggattgaagcagttccagaatgagcaagttgcaagggctgtgttcgctgttcttaaatctgtagctatgattgcgctcgcattcgtcacggctggtgcaacggctcctggggctgcagcatctgcagcgcaagctgtgaacatagccggtcaagcggcacaagctctgcgaagggtggtggaaattctagaggggctcgaggctgtgatggaggttgtggctgctgtgaaggacctcgtggattcattggaacaggtaggtcagattgtggacgcaccggtgatgccggaattgccctcagaggcggactggtccatttttgtgaacgaggtggaggccgtggcagagggcatgccaacggaagtctcggaggttccggtgtggaaggccaagtgcaagaatgtggctgcactgggtcgggagatgagcatcacggcagtacagatgtcggagctgcagtatgacatctgggtgcaaggcatgatgcgggatatggctcgaagccaggcagacaggctggccgcaattcaacccgcggaccttaccaactatttggagatggctacccagatggatatgcggactacgaggatgctgctggggctcctcaacatattgcgcatccagaatgcggcgctcaggtacgagtatcttctaatgcccacggagctcacaacatggccactgggtatggataccgtgggtgacttgctcatcgcgcaggagaatgctgcactgataggattaatgcagctagggccctcatctgatttcacgagcaggcatgtggtgaaagacatacctgtgaacttgctgctcgatggcgaggattgggagtttgagattcctgtgcaagctggcatgtccagcttcccttccagctggtctcgcgtccgtattcggcacctggagatgcactttgtgaaggaggccagcggtattggtggtgagattatccaccagcctaccacccagactgggaccgtttacatccttctgcagggttccactatcttccatgaccgcagaagagaccaggtgttgccttttcaggccgctgctccgctcaactaccattacgcgtaccgcctcgacactggagaagccactcttacgaacgagccctcggaacagtttgccaacacattcatgcagatgacaccgttcactcactggaggcttcgtctgtctgcgtccgcagcggagaataaaggattagcctttcccacagctacagctcccgactccaccactgagattgccatcactttccatgttacggccattagacaaattgactggcggcaagaggaggag

SEQ ID NO: 442 - DNA, 2559 bp, Artificial Sequence
  Synthetic
atggattacagcacgctttacagggatctgaaccagataagcatgcccctggatcgggtagagttctcagaggtgatggtaatccacaggatgtacttgaggttatctgatctgaatgtggggcagctcgagggagccgagagggtgaagcggttgtatgtgtttgcggacgtggtggagctcgcaacatttgcgcatccacagttgcttaatacgcggatgccaggatcggtgacggtgatcattctgtgtcgtcttcttcagtttccaactgatgggtcgttcgctgcttggctcgagctgccgttcatggagttgcacacactcatagaacaatacaggtcagagataaaagcagcagatgacgcgaaatggggaacgtatgtacacgcggaggaagtacagctcagcccgctgtttaatgggtggccttatctggttgttgaggcacagcgctgtattataaccgcggccatgcacaatacatttaaccgccctgggtgggttcgctccattactcaatttacaactgatcagtccggtcgggtagataccacactgctcgcacgaacagaattcggccatattgatctaccactcgaaacagattccccaacggcattcagtgtttcacaccgccaaagtacgaatttgcccgtagagtacaccggtattccagtggaggtggtgaccgatcctaacatcttgatgggcatgcaaaccagcgtgcacattgcggagctagtgaaggcatgttacccgtcaccagaattagtgagcgctgtaggggtgcacgtgaattggctcaacgaagtcttgctccgagttgtccagaaggaatctcagttgcaagggaccgaggcctacaacgagtgccttgcgcttttaggtcgcattcaatgtgtcatgaagatggggccgtttgtctcggtagtgccgcagctgcaatacagaatgtatggtagcctcatcaaccaaatggcccaagtagcacaaaactacgaccgagaattcaagcaattcaaattattcatcatccaaaatcaaatccttggcagctatttgctgcagcagaacagggcctttgctgacagagaggtgcagatggagagctttcattcagcggtcatttctcaaagaaggcaggagttggacgacgccatcgctaagatggaccgactgagcttgcagatggaggaagaggacagagcaatggagcaagcccgaaaagaaatggaagaaggattgaagcagttccagaatgagcaagttgcaagggctgtgttcgctgttcttagcgctgtagctcagattgggcttgcattccttacggctggtgcaacggctcctggagctgtggcgtcggcggggcaagctgtgagcatagcaggtcaggcggcgcaaggtctgcgaagggtggtggaaattctagaggggctcgaggctgtgatggaggttgtggctgctataaagcaccttgtggatgctctggaccaggtaagtcagattgtggatgcaccacctatgccagacatgccctcggaggcggactggtccatttttgtgaatgagattgaagccgtggcagaggggatgccgacggaagtctcggaggttccggcgtggaaggccaagtgcaagaatgtggctgcactgggtagggagatgtgcatcacggcagaacagatttcccagctccagtatgacatctgggtgcaaggcttgttgcgggatatagctcaaagccacgcagaccggctggcagcgattcaacctgctaatcttaccaactatttggagatggcaatacagatggatatgcggactacgaggatactgatagggctcctcaacataatgcgcatccagaatgcggcacttatgtatgagtaccttctaacgcccacgcagctcactgcatggccgctgagaatggatactgtggccaacttgctcatcacgcacgagagtgctgcactgtcaggattagctcagttagggcccccatcggacttcacgagcaggcatgtagtgaaaggcatacctgtgagcttgcttctagacggtggggattgggaatttgagattcctgtgcaagctggcatgtccagcttcccttccagctggtctcgcgtccgtattcggcacctggagatgcactttgtgaaggaggccagcggtattggtggtgagattatccaccagcctgccacccagacggggaccgtttacatccttctgcagggttccactatcttccatgaccgcagaagagaccaggtgttgccttttcaggccgctgctccgctcaactaccattacgcgtaccgcctcgacaccggcgactccactctcacaaacgaaccctctgaacagtttgccaacaagttcatgcagatgacacccttcacccgttggaggcttcgtctgtctgcgtccgcaaaagagaatgcaggattagcctttcccacggctacagcacttgactccactacccagattgtcatcactttccatgttacggccatcagacaaattgactggcggcacgacgaagag

SEQ ID NO: 443 - DNA, 2556 bp, Artificial Sequence
  Synthetic
atggattacagcacgctttacagggatctgaaccagataagcatgcccctggatcgggtagagttctcagaggtgatggtgatccacaggatgtacttgaggttatctgatctgaatgtgggggagctccccggagccgagagggtgaagcggttgtatgtgttggcagacgtggtggagctcgcaacatttgcgcatccacagttgcttaatacgcggatgccaggatcggtgacggtgatcattctgtgtcgtcttcttcagtttccaactgatgggtcgttcgctgcttggctcgagctgccgttcatggagttgcacacactcatagaacaatacaggtcagagataaccgcagcagatgacgcgaaatggggaacgtatgtacacgcggaggaagtacagctcagcccgctgtttaatgggtggccttatctggttgttgaggcacagcgctgtattataaccgcggccatgcacaatacatttaaccgccctgggtgggttcgctccattactcaatttacaactgatcagtccggtcgggtagataccacactgctcgcacgaacagaattcggccatattgatctaccactcgaaacagattccccaacggcattcagtgtttcacaccgccaaagtacgaatttgcccgtagagtacaccggtattccagtggaggtggtgaccgatcctaacatcttgatgggcatgcaaaccagcgtgcacattgcggagctagtgaaggcatgttacccgtcaccagaattagtgagcgctgtaggggagcacgtgaattggctcaacgaagtcttgctccgagttgtccagaaggaatctcagttgcaagggaccgaggcctacaacgagtgccttgcgcttttaggtcgcattcaatgtgtcatgaagatggggccgtttgtctcggtagtgccgcagctgcaatacagaatgtatggtagcctcatcagacaaatggcccaggtagcacagaactacgaccaagatttcaggcagctcaagttattcattgcccaaaaccaaatccttggcagctatttgctgcagcagaacaaggcctttgctgacagagaggtgcagatggagagctttcattcagcggtcatttctcaaagaaggcaggagttggacgacgccatcgctaagatggaccgactgagcttgcagatggaggaagaggacagagcaatggagcaagcccgaaaagaaatggaagaaggattgaagcagttccagaatgagcaagttgcaagggctgtgttcgctgttcttaaatctgtagctatgattgcgctcgcattcgtcacggctggtgcaacggctcctggggctgcagcatctgcagcgcaagctgtgaacatagccggtcaagcggcacaagctctgcgaagggtggtggaaattctagaggggctcgaggctgtgatggaggttgtggctgctataaagcaccttgtggatgctctggaccaggtaagtcagattgtggatgcaccacctatgccagacatgccctcggaggcggactggagtatttttgtgaatgagattgaagccgtggcagaggggatgccgacggaagtctcggaggttccggtgtggagggccaagtgcaagaatgtggctgcactgggtagggagatgagcatcacggcagtacagatgtcggagctgcagtatgacatctgggtgcaaggcatgatgcgggatatggctcgaagccaggcagacaggctggccgcaattcaacccgcggaccttaccaactatttggagatggctacccagatggatatgcggactacgaggatgctgctggggctcctcaacataatgcgcatccagaatgcggcacttatgtatgagtaccttctaacgcccacgcagctcactgcatggccgctgagaatggatactgtggccaacttgctcatcacgcacgagagtgctgcactgtcaggattagctcagttagggcccccatcggacttcacgagcaggcatgtagtgaaaggcatacctgtgagcttgcttctagacggtggggattgggaatttgagattcctgtgcaaggtggcatgtccagtttcccttccagctggactcgagtgcggattcggcacctggagatgcactttgtgcaggaggcgagcggtggcggcgagattatccaccagcctgccacccagacggggaccatttacatcctcctgcagggctccactgtcttccatgatcgcagaagggaggaggtgatgacctttcaggcagcggttccgctcaactaccattacgcgtaccgcctcgacactggagaagccactcttacgaacgagccctcggaacagtttgccaacacattcatgcagatgacaccgttcactcactggaggctacgtctgtctgcgtccgcagcggagaataaaggattagcctttcccacagctacagctcccgactccaccactgagattgccatcactttccatgttacggccattagacaaattgactggcggcaagaggaggag

SEQ ID NO: 444 - DNA, 2556 bp, Artificial Sequence; identical to SEQ ID NO: 431
  Synthetic

SEQ ID NO: 445 - DNA, 2556 bp, Artificial Sequence
  Synthetic
atggattacagcacgctttacagggatctgaaccagataagcatgcccctggatcgggtagagttctcagaggtgatggtaatccacaggatgtacttgaggttatctgatctgaatgtgggggagctccccggagccgagagggtgaagcggttgtatgtgtttgcggacgtggtggagctcgcaacatttgcgcatccacagttgcttaatacgcggatgccaggatcggtgacggtgatcattctgtgtcgtcttcttcagtttccaactgatgggtcgttcgctgcttggctcgagctgccgttcatggagttgcacacactcatagaacaatacaggtcagagataaaagcagcagatgacgcgaaatggggaacgtatgtacacgcggaggaagtacagctcagcccgctgtttaatgggtggccttatctggttgttgaggcacagcgctgtattataaccgcggccatgcacaatacatttaaccgccctgggtgggttcgctccattactcaatttacaactgatcagtccggtcgggtagataccacactgctcgcacgaacagaattcggccatattgatctaccactcgaaacagattccccaacggcattcagtgtttcacaccgccaaagtacgaatttgcccgtagagtacaccggtattccagtggaggtggtgaccgatcctaacatcttgatgggcatgcaaaccagcgtgcacattgcggagctagtgaaggcatgttacccgtcaccagaattagtgagcgctgtaggggtgcacgtgaattggctcaacgaagtcttgctccgagttgtccagaaggaatctcagttgcaagggaccgaggcctacaacgagtgccttgcgcttttaggtcgcattcaatgtgtcatgaagatggggccgtttgtctcggtagtgccgcagctgcaatacagaatgtatggtagcctcatcagacaaatggcccaggtagcacagaactacgaccaagatttcaggcagctcaagttattcattgcccaaaaccaaatccttggcagctatttgctgcagcagaacaaggcctttgctgacagagaggtgcagatggagagctttcattcagcggtcatttctcaaagaaggcaggagttggacgacgccatcgctaagatggaccgactgagcttgcagatggaggaagaggacagagcaatggagcaagcccgaaaagaaatggaagaaggattgaagcagttccagaatgagcaagttgcaagggctgtgttcgctgttcttaaatctgtagctatgattgcgctcgcattcgtcacggctggtgcaacggctcctggggctgcagcatctgcagcgcaagctgtgaacatagccggtcaagcggcacaagctctgcgaagggtggtggaaattctagaggggctcgaggctgtgatggaggttgtggctgctataaagcaccttgtggatgctctggaccaggtaagtcagattgtggatgcaccacctatgccagacatgccctcggaggcggactggagtatttttgtgaatgagattgaagccgtggcagaggggatgccgacggaagtctcggaggttccggcgtggaaggccaagtgcaagaatgtggctgcactgggtcgggagatgagcatcacggcagtacagatgtcggagctgcagtatgacatctgggtgcaaggcatgatgcgggatatggctcgaagccaggcagacaggctggccgcaattcaacccgcggaccttaccaactatttggagatggctacccagatggatatgcggactacgaggatgctgctggggctcctcaacataatgcgcatccagaatgcggcacttatgtatgagtaccttctaacgcccacgcagctcactgcatggccgctgagaatggatactgtggccaacttgctcatcacgcacgagagtgctgcactgtcaggattagctcagttagggcccccatcggacttcacgagcaggcatgtagtgaaaggcatacctgtgagcttgcttctagacggtggggattgggaatttgagattcctgtgcaaggtggcatgtccagtttcccttccagctggactcgagtgcggattcggcacctggagatgcactttgtgcaggaggcgagcggtggcggcgagattatccaccagcctgccacccagacggggaccatttacatcctcctgcagggctccactgtcttccatgatcgcagaagggaggaggtgatgacctttcaggcagcggttccgctcaactaccattacgcgtaccgcctcgacactggagaagccactcttacgaacgagccctcggaacagtttgccaacaagttcatgcagatgacacccttcacccgttggaggcttcgtctgtctgcgtccgcaaaagagaatgtaggattagcctttcccacggctacagcacttgactccaccactgagattgccatcactttccatgttacggccattagacaaattgactggcggcaagaggaggag

SEQ ID NO: 446 - DNA, 2559 bp, Artificial Sequence
  Synthetic
atggattacagcacgctttacagggatctgaaccagataagcatgcccctggatcgggtagagttctcagaggtgatggtaatccacaggatgtacttgaggttatctgatctgaatgtgggggagctccccggagccgagagggtgaagcggttgtatgtgttggcagacgtggtggagctcgcaacatttgcgcatccacagttgcttaatacgcggatgccaggatcggtgacggtgatcattctgtgtcgtcttcttcagtttccaactgatgggtcgttcgctgcttggctcgagctgccgttcatggagttgcacacactcatagaacaatacaggtcagagataaaagcagcagatgacgcgaaatggggaacgtatgtacacgcggaggaagtacagctcagcccgctgtttaatgggtggccttatctggttgttgaggcacagcgctgtattataaccgcggccatgcacaatacatttaaccgccctgggtgggttcgctccattactcaatttacaactgatcagtccggtcgggtagataccacactgctcgcacgaacagaattcggccatattgatctaccactcgaaacagattccccaacggcattcagtgtttcacaccgccaaagtacgaatttgcccgtagagtacaccggtattccagtggaggtggtgaccgatcctaacatcttgatgggcatgcaaaccagcgtgcacattgcggagctagtgaaggcatgttacccgtcaccagaattagtgagcgctgtaggggagcacctgaactggctcaacgaagtcttgctccgagttgtccagaaggaatctcagttgcaagggaccgaggcctacaacgagtgccttgcgcttttaggtcgcattcaatgtgtcatgaagatggggccgtttgtctcggtagtgccgcagctgcaatacagaatgtatggtagcctcatcagacaaatggcccaggtagcacagaactacgaccaagatttcaggcagctcaagttattcattgcccaaaaccaaatccttggcagctatttgctgcagcagaacaaggcctttgctgacagagaggtgcagatggagagctttcattcagcggtcatttctcaaagaaggcaggagttggacgacgccatcgctaagatggaccgactgagcttgcagatggaggaagaggacagagcaatggagcaagcccgaaaagaaatggaagaaggattgaagcagttccagaatgagcaagttgcaagggctgtgttcgctgttcttaaatctgtagctatgattgcgctcgcattcgtcacggctggtgcaacggctcctggggctgcagcatctgcagcgcaagctgtgaacatagccggtcaagcggcacaagctctgcgaagggtggtggaaattctagaggggctcgaggctgtgatggaggttgtggctgctgtgaaggacctcgtggattcattggaacaggtaggtcagattgtggacgcaccggtgatgccggaattgccctcagaggcggactggtccatttttgtgaacgaggtggaggccgtggcagagggcatgccaacggaagtctcggaggttccggtgtggagggccaagtgcaagaatgtggctgcactgggtcgggagatgagcatcacggcagtacagatgtcggagctgcagtatgacatctgggtgcaaggcatgatgcgggatatggctcgaagccaggcagacaggctggccgcaattcaacccgcggaccttaccaactatttggagatggctacccagatggatatgcggactacgaggatgctgctggggctcctcaacatattgcgcatccagaatgcggcgctcaggtacgagtatcttctaatgcccacggagctcacaacatggccactgggtatggataccgtgggtgacttgctcatcgcgcaggagaatgctgcactgataggattaatgcagctagggccctcatctgatttcacgagcaggcatgtggtgaaagacatacctgtgaacttgctgctcgatggcgaggattgggagtttgagattcctgtgcaagctggcatgtccagcttcccttccagctggtctcgcgtccgtattcggcacctggagatgcactttgtgaaggaggccagcggtattggtggtgagattatccaccagcctaccacccagacggggaccatttacatcctcctgcagggctccactgtcttccatgatcgcagaagggaggaggtgatgacctttcaggcagcggttccgctcaactaccattacgcgtaccgcctcgacactggagaagccactcttacgaacgagccctcggaacagtttgccaacacattcatgcagatgacaccgttcactcactggaggctacgtctgtctgcgtccgcagcggagaataaaggattagcctttcccacagctacagctcccgactccaccactgagattgccatcactttccatgttacggccattagacaaattgactggcggcaagaggaggag

SEQ ID NO: 447 - DNA, 2556 bp, Artificial Sequence
  Synthetic
atggattacagcacgctttacagggatctgaaccagataagcatgcccctggatcgggtagagttctcagaggtgatggtaatccacaggatgtacttgaggttatctgatctgaatgtgggggagctccccggagccgagagggtgaagcggttgtatgtgttggcagacgtggtggagctcgcaacatttgcgcatccacagttgcttaatacgcggatgccaggatcggtgacggtgatcattctgtgtcgtcttcttcagtttccaactgatgggtcgttcgctgcttggctcgagctgccgttcatggagttgcacacactcatagaacaatacaggtcagagataaaagcagcagatgacgcgaaatggggaacgtatgtacacgcggaggaagtacagctcagcccgctgtttaatgggtggccttatctggttgttgaggcacagcgctgtattataaccgcggccatgcacaatacatttaaccgccctgggtgggttcgctccattactcaatttacaactgatcagtccggtcgggtagataccacactgctcgcacgaacagaattcggccatattgatctaccactcgaaacagattccccaacggcattcagtgtttcacaccgccaaagtacgaatttgcccgtagagtacaccggtattccagtggaggtggtgaccgatcctaacatcttgatgggcatgcaaaccagcgtgcacattgcggagctagtgaaggcatgttacccgtcaccagaattagtgagcgctgtaggggtgcacgtgaattggctcaacgaagtcttgctccgagttgtccagaaggaatctcagttgcaagggaccgaggcctacaacgagtgccttgcgcttttaggtcgcattcaatgtgtcatgaagatggggccgtttgtctcggtagtgccgcagctgcaatacagaatgtatggtagcctcatcagacaaatggcccaggtagcacagaactacgaccaagatttcaggcagctcaagttattcattgcccaaaaccaaatccttggcagctatttgctgcagcagaacaaggcctttgctgacagagaggtgcagatggagagctttcattcagcggtcatttctcaaagaaggcaggagttggacgacgccatcgctaagatggaccgactgagcttgcagatggaggaagaggacagagcaatggagcaagcccgaaaagaaatggaagaaggattgaagcagttccagaataggcaagttgcgaacgccctctttgccgttcttagcgctgtagctcagattgggcttgcattccttacggctggtgcaacggctcctggggctgcagcatctgcagcgcaagctgtgaacatagccggtcaggcggcgcaaggtctgcgaagggtggtggaaattctagagcagctggaggctgtgatggaggttgtggctgctgtgaaggacctcgtggattcattggaacaggtaggtcagattgtggacgcaccggtgatgccggaattgccctcagaggcggactggtccatttttgtgaacgaggtggaggccgtggcagagggcatgccaacggaagtctcggaggttccggtgtggagggccaagtgcaagaatgtggctgcactgggtagggagatgtgcatcacggcagaacagatttcccagctccagtatgacatctgggtgcaaggcttgttgcgggatatagctcaaagccacgcagaccggctggcagcgattcaacctgctaatcttaccaactatttggagatggcaatacagatggatatgcggactacgaggatactgatagggctcctcaacataatgcgcatccagaatgcggcacttatgtatgagtaccttctaacgcccacgcagctcactgcatggccgctgagaatggatactgtggccaacttgctcatcacgcacgagagtgctgcactgtcaggattagctcagttagggcccccatcggacttcacgagcaggcatgtagtgaaaggcatacctgtgagcttgcttctagacggtggggattgggaatttgagattcctgtgcaaggtggcatgtccagtttcccttccagctggactcgagtgcggattcggcacctggagatgcactttgtgcaggaggcgagcggtggcggcgagattatccaccagcctgccacccagacggggaccatttacatcctcctgcagggctccactgtcttccatgatcgcagaagggaggaggtgatgacctttcaggcagcggttccgctcaactaccattacgcgtaccgcctcgacactggagaagccactcttacgaacgagccctcggaacagtttgccaacacattcatgcagatgacaccgttcactcactggaggctacgtctgtctgcgtccgcagcggagaataaaggattagcctttcccacagctacagctcccgactccaccactgagattgccatcactttccatgttacggccattagacaaattgactggcggcacgacgaagag

SEQ ID NO: 448 - DNA, 2559 bp, Artificial Sequence
  Synthetic
atggattacagcacgctttacagggatctgaaccagataagcatgcccctggatcgggtagagttctcagaggtgatggtaatccacaggatgtacttgaggttatctgatctgaatgtgggggagctccccggagccgagagggtgaagcggttgtatgtgttggcagacgtggtggagctcgcaacatttgcgcatccacagttgcttaatacgcggatgccaggatcggtgacggtgatcattctgtgtcgtcttcttcagtttccaactgatgggtcgttcgctgcttggctcgagctgccgttcatggagttgcacacactcatagaacaatacaggtcagagataaaagcagcagatgacgcgaaatggggaacgtatgtacacgcggaggaagtacagctcagcccgctgtttaatgggtggccttatctggttgttgaggcacagcgctgtattataaccgcggccatgcacaatacatttaaccgccctgggtgggttcgctccattactcaatttacaactgatcagtccggtcgggtagataccacactgctcgcacgaacagaattcggccatattgatctaccactcgaaacagattccccaacggcattcagtgtttcacaccgccaaagtacgaatttgcccgtagagtacaccggtattccagtggaggtggtgaccgatcctaacatcttgatgggcatgcaaaccagcgtgcacattgcggagctagtgaaggcatgttacccgtcaccagaattagtgagcgctgtaggggtgcacgtgaattggctcaacgaagtcttgctccgagttgtccagaaggaatctcagttgcaagggaccgaggcctacaacgagtgccttgcgcttttaggtcgcattcaatgtgtcatgaagatggggccgtttgtctcggtagtgccgcagctgcaatacagaatgtatggtagcctcatcagacaaatggcccaggtagcacagaactacgaccaagatttcaggcagctcaagttattcattgcccaaaaccaaatccttggcagctatttgctgcagcagaacagggcatttgctgacagagaggtgcagatggagagctttcattcagcggtcatttctcaaagaaggcaggagttggacgacgccatcgctaagatggaccgactgagcttgcagatggaggaagaggacagagcaatggagcaagcccgaaaagaaatggaagaaggattgaagcagttccagaatgagcaagttgcaagggctgtgttcgctgttcttaaatctgtagctatgattgcgctcgcattcgtcacggctggtgcaacggctcctggggctgcagcatctgcagcgcaagctgtgagcatagcaggtcaggcggcgcaaggtctgcgaagggtggtggaaattctagagcagctggaggctgtgatggaggttgtggctgctgtgaaggacctcgtggattcattggaacaggtaggtcagattgtggacgcaccggtgatgccggaattgccctcagaggcggactggtccatttttgtgaacgaggtggaggccgtggcagagggcatgccaacggaagtctcggaggttccggtgtggagggccaagtgcaagaatgtggctgcactgggtcgggagatgagcatcacggcagtacagatgtcggagctgcagtatgacatctgggtgcaaggcttgttgcgggatatagctcaaagccacgcagaccggctggcagcgattcaacctgctaatcttaccaactatttggagatggcaatacagatggatatgcggactacgaggatactgatagggctcctcaacataatgcgcatccagaatgcggcacttatgtatgagtaccttctaacgcccacgcagctcactgcatggccgctgagaatggatactgtggccaacttgctcatcacgcacgagagtgctgcactgtcaggattagctcagttagggccctcatctgatttcacgagcaggcatgtggtgaaagacatacctgtgaacttgctgctcgatggcgaggattgggagtttgagattcctgtgcaagctggcatgtccagcttcccttccagctggtctcgcgtccgtattcggcacctggagatgcactttgtgaaggaggccagcggtattggtggtgagattatccaccagcctaccacccagactgggaccgtttacatccttctgcagggttccactatcttccatgaccgcagaagagaccaggtgttgccttttcaggccgctgctccgctcaactaccattacgcgtaccgcctcgacaccggcgactccactctcacaaacgaaccctctgaacagtttgccaacaagttcatgcagatgacacccttcacccgttggaggcttcgtctgtctgcgtccgcaaaagagaatgcaggattagcctttcccacggctacagcacttgactccactacccagattgtcatcactttccatgttacggccatcagacaaattgactggcggcacgacgaagag

SEQ ID NO: 449 - DNA, 2556 bp, Artificial Sequence
  Synthetic
atggattacagcacgctttacagggatctgaaccagataagcatgcccctggatcgggtagagttctcagaggtgatggtaatccacaggatgtacttgaggttatctgatctgaatgtgggggagctccccggagccgagagggtgaagcggttgtatgtgttggcagacgtggtggagctcgcaacatttgcgcatccacagttgcttaatacgcggatgccaggatcggtgacggtgatcattctgtgtcgtcttcttcagtttccaactgatgggtcgttcgctgcttggctcgagctgccgttcatggagttgcacacactcatagaacaatacaggtcagagataaaagcagcagatgacgcgaaatggggaacgtatgtacacgcggaggaagtacagctcagcccgctgtttaatgggtggccttatctggttgttgaggcacagcgctgtattataaccgcggccatgcacaatacatttaaccgccctgggtgggttcgctccattactcaatttacaactgatcagtccggtcgggtagataccacactgctcgcacgaacagaattcggccatattgatctaccactcgaaacagattccccaacggcattcagtgtttcacaccgccaaagtacgaatttgcccgtagagtacaccggtattccagtggaggtggtgaccgatcctaacatcttgatgggcatgcaaaccagcgtgcacattgcggagctagtcaaggcatgttacccgtcaccagaattagtgagcgctgtaggggtgcacgtgaattggctcaacgaagtcttgctccgagttgtccagaaggaatctcagttgcaagggaccgaggcctacaacgagtgccttgcgcttttaggtcgcattcaatgtgtcatgaagatggggccgtttgtctcggtagtgccgcagctgcaatacagaatgtatggtagcctcatcagacaaatggcccaggtagcacagaactacgaccaagatttcaggcagctcaagttattcattgcccaaaaccaaatccttggcagctatttgctgcagcagaacaaggcctttgctgacagagaggtgcagatggagagctttcattcagcggtcatttctcaaagaaggcaggagttggacgacgccatcgctaagatggaccgactgagcttgcagatggaggaagaggacagagcaatggagcaagcccgaaaagaaatggaagaaggattgaagcagttccagaatgagcaagttgcaagggctgtgttcgctgttcttaaatctgtagctatgattgcgctcgcattcgtcacggctggtgcaacggctcctggggctgcagcatctgcagcgcaagctgtgaacatagcaggtcaggcggcgcaaggtctgcgaagggtggtggaaattctagagcagctggaggctgtgatggaggttgtggctgctgtgaaggacctcgtggattcattggaacaggtaggtcagattgtggacgcaccggtgatgccggaattgccctcggaggcggactggagtatttttgtgaatgagattgaagccgtggcagaggggatgccgacggaagtctcggaggttccggtgtggagggccaagtgcaagaatgtggctgcactgggtagggagatgtgcatcacggcagaacagatttcccagctccagtatgacatctgggtgcaaggcttgttgcgggatatagctcaaagccacgcagaccggctggcagcgattcaacctgctaatcttaccaactatttggagatggcaatacagatggatatgcggactacgaggatactgatagggctcctcaacataatgcgcatccagaatgcggcacttatgtatgagtaccttctaacgcccacgcagctcactgcatggccgctgagaatggatactgtggccaacttgctcatcacgcacgagagtgctgcactgtcaggattagctcagttagggcccccatcggacttcacgagcaggcatgtagtgaaaggcatacctgtgagcttgcttctagacggtggggattgggaatttgagattcctgtgcaaggtggcatgtccagtttcccttccagctggactcgagtgcggattcggcacctggagatgcactttgtgcaggaggcgagcggtggcggcgagattatccaccagcctgccacccagacggggaccatttacatcctcctgcagggctccactgtcttccatgatcgcagaagggaggaggtgatgacctttcaggcagcggttccgctcaactaccattacgcgtaccgcctcgacaccggcgactccactctcacaaacgaaccctctgaacagtttgccaacaagttcatgcagatgacaccgttcactcactggaggctacgtctgtctgcgtccgcagcggagaataaaggattagcctttcccacagctacagctcccgactccaccactgagattgccatcactttccatgttacggccattagacaaattgactggcggcaagaggaggag

SEQ ID NO: 450 - DNA, 2556 bp, Artificial Sequence
  Synthetic
atggattacagcacgctttacagggatctgaaccagataagcatgcccctggatcgggtagagttctcagaggtgatggtaatccacaggatgtacttgaggttatctgatctgaatgtggggcagctcgagggagccgagaaagtgaagcggttgtatgtgttggcagacgtggtggagctcgcaacatttgcgcatccacagttgcttaatacgcggatgccaggatcggtgacggtgatcatattgtgtcgtcttcttcaatggccaactgatgggtcgttcgctgcttggctcgagctgccgttcatggagttgcacacactcatagaacaatacaggtcagagataaaagcagcagatgacgcgaaatggggaacgtatgtacacgcggaggaagtacagctcagcccgctgtttaatgggtggccttatctggttgttgaggcacagcgctgtattataaccgcggccatgcacaatacatttaaccgccctgggtgggttcgctccattactcaatttacaactgatcagtccggtcgggtagataccacactgctcgcacgaacagaattcggccatattgatctaccactcgaaacagattccccaacggcattcagtgtttcacaccgccaaagtacgaatttgcccgtagagtacaccggtattccagtggaggtggtgaccgatcctaacatcttgatgggcatgcaaaccagcgtgcacattgcggagctagtgaaggcatgttacccgtcaccagaattagtgagcgctgtaggggtgcacgtgaattggctcaacgaagtcttgctccgagttgtccagaaggaatctcagttgcaagggaccgaggcctacaacgagtgccttgcgcttttaggtcgcattcaatgtgtcatgaagatggtgagaattggcttagtagtgccccagctgcaatacagaatgtacggtagcctcatcaaccaaatggcccaagtagcacaaaactacgaccgagaattcaagcaattcaaattattcatcatccaaaatcaaatccttggcagctatttgctgcagcagaacagggcatttgctgacagagaggtgcagatggagagctttcattcagcggtcatttctcaaagaaggcaggagttggacgacgccatcgctaagatggaccgactgagcttgcagatggaggaagaggacagagcaatggagcaagcccgaaaagaaatggaagaaggattgaagcagttccagaatgagcaagttgcaagggctgtgttcgctgttcttaaatctgtagctatgattgcgctcgcattcgtcacggctggtgcaacggctcctggggctgcagcatctgcagcgcaagctgtgaacatagccggtcaagcggcacaagctctgcgaagggtggtggaaattctagaggggctcgaggctgtgatggaggttgtggctgctataaagcaccttgtggatgctctggaccaggtaagtcagattgtggatgcaccacctatgccagacatgccctcggaggcgggctggtccatttttgtgaacgaggtggaggccgtggcagagggcatgccaacggaagtctcggaggttccggtgtggagggccaagtgcaagaatgtggctgcactgggtcgggagatgagcatcacggcagtacagatgtcggagctgcagtatgacatctgggtgcaaggcatgatgcgggatatggctcgaagccaggcagacaggctggccgcaattcaacccgcggaccttaccaactatttggagatggctacccagatggatatgcggactacgaggatgctgctggggctcctcaacatattgcgcatccagaatgcggcacttatgtatgagtaccttctaacgcccacgcagctcactgcatggccgctgagaatggatactgtggccaacttgctcatcacgcacgagagtgctgcactgtcaggattagctcagttagggcccccatcggacttcacgagcaggcatgtagtgaaaggcatacctgtgagcttgcttctagacggtggggattgggaatttgagattcctgtgcaaggtggcatgtccagtttcccttccagctggactcgagtgcggattcggcacctggagatgcactttgtgcaggaggcgagcggtggcggcgagattatccaccagcctgccacccagacggggaccatttacatcctcctgcagggctccactgtcttccatgatcgcagaagggaggaggtgatgacctttcaggcagcggttccgctcaactaccattacgcgtaccgcctcgacactggagaagccactcttacgaacgagccctcggaacagtttgccaacacattcatgcagatgacaccgttcactcactggaggctacgtctgtctgcgtccgcagcggagaataaaggattagcctttcccacagctacagctcccgactccaccactgagattgccatcactttccatgttacggccattagacaaattgactggcggcaagaggaggag

SEQ ID NO: 451 - DNA, 2559 bp, Artificial Sequence
  Synthetic
atggattacagcacgctttacagggatctgaaccagataagcatgcccctggatcgggtagagttctcagaggtgatggtaatccacaggatgtacttgaggttatctgatctgaatgtgggggagctccccggagccgagagggtgaagcggttgtatgtgttggcagacgtggtggagctcgcaacatttgcgcatccacagttgcttaatacgcggatgccaggatcggtgacggtgatcattctgtgtcgtcttcttcagtttccaactgatgggtcgttcgctgcttggctcgagctgccgttcatggagttgcacacactcatagaacaatacaggtcagagataaaagcagcagatgacgcgaaatggggaacgtatgtacacgcggaggaagtacagctcagcccgctgtttaatgggtggccttatctggttgttgaggcacagcgctgtattataaccgcggccatgcacaatacatttaaccgccctgggtgggttcgctccattactcaatttacaactgatcagtccggtcgggtagataccacactgctcgcacgaacagaattcggccatattgatctaccactcgaaacagattccccaacggcattcagtgtttcacaccgccaaagtacgaatttgcccgtagagtacaccggtattccagtggaggtggtgaccgatcctaacatcttgatgggcatgcaaaccagcgtgcacattgcggagctagtgaaggcatgttacccgtcaccagaattagtgagcgctgtaggggtgcacgtgaattggctcaacgaagtcttgctccgagttgtccagaaggaatctcagttgcaagggaccgaggcctacaacgagtgccttgcgcttttaggtcgcattcaatgtgtcatgaagatggggccgtttgtctcggtagtgccgcagctgcaatacagaatgtatggtagcctcatcagacaaatggcccaggtagcacagaactacgaccaagatttcaggcagctcaagttattcattgcccaaaaccaaatccttggcagctatttgctgcagcagaacaaggcctttgctgacagagaggtgcagatggagagctttcattcagcggtcatttctcaaagaagggaggagttggacaatacattcgcaaagatggaccgattgagcgggcaaatggaggcagagagtagtgcaatggagcaagccaaaaaggaaatggacgaaggattgaggcagttccagaataggcaagttgcgaacgccctctttgccgttcttagcgctgtagctcagattgggcttgcattccttacggctggtgcaacggctcctggagctgtggcgtcggcggggcaagctgtgagcatagcaggtcaggcggcgcaaggtctgcgaagggtggtggaaattctagagcagctggaggctgtgatggaggttgtggctgctgtgaaggacctcgtggattcattggaacaggtaggtcagattgtggacgcaccggtgatgccggaattgccctcagaggcggactggtccatttttgtgaacgaggtggaggccgtggcagagggcatgccaacggaagtctcggaggttccggtgtggagggccaagtgcaagaatgtggctgcactgggtcgggagatgagcatcacggcagtacagatgtcggagctgcagtatgacatctgggtgcaaggcttgttgcgggatatagctcaaagccacgcagaccggctggcagcgattcaacctgctaatcttaccaactatttggagatggcaatacagatggatatgcggactacgaggatgctgctggggctcctcaacatattgcgcatccagaatgcggcgctcaggtacgagtatcttctaatgcccacggagctcacaacatggccactgggtatggataccgtgggtgacttgctcatcgcgcaggagaatgctgcactgataggattaatgcagctagggccctcatctgatttcacgagcaggcatgtggtgaaagacatacctgtgaacttgctgctcgatggcgaggattgggagtttgagattcctgtgcaagctggcatgtccagcttcccttccagctggtctcgcgtccgtattcggcacctggagatgcactttgtgaaggaggccagcggtattggtggtgagattatccaccggcctgccacccagacggggaccatttacatcctcctgcagggctccactgtcttccatgatcgcagaagggaggaggtgatgacctttcaggcagcggttccgctcaactaccattacgcgtaccgcctcgacactggagaagccactcttacgaacgagccctcggaacagtttgccaacacattcatgcagatgacaccgttcactcactggaggctacgtctgtctgcgtccgcagcggagaataaaggattagcctttcccacagctacagctcccgactccaccactgagattgccatcactttccatgttacggccattagacaaattgactggcggcaagaggaggag

SEQ ID NO: 452 - DNA, 2595 bp, Artificial Sequence
  Synthetic
atggattacagcacgctttacagggatctgaaccagataagcatgcccctggatcgggtagagttctcagaggtgatggtaatccacaggatgtacttgaggttatctgatctgaatgtgggggagctccccggagccgagagggtgaagcggttgtatgtgttggcagacgtggtggagctcgcaacatttgcgcatccacagttgcttaatacgcggatgccaggatcggtgacggtgatcattctgtgtcgtcttcttcaatggccaactgatgggaggcagtcggacaccgagctccacctgacattcatgaagttgcatgccatacaacgagaggaaaatcggtgggagataaccgcagcagatggcatgaactggggagtttacatacacgcagaggaagtacaggttggcgtgctgacaatgtcatggtcttcggtacttagagtttcggcacttcgctctgttataacctccggctttcgcgccgttagtgtgtttgaggtaccgggaagtgtaaggtccacccttggagctactttaaggcccgatcacgccttatatagtacaactatgcaagccacacccaacgcatcgcatattagtgcttttaaccttcgcatagtttccccgtcggcatatcgtgtttgtcctctccaaaatgacacagatacctacttaggtattccagcagacgtggcggcagttcttccagtagacgtggtgactgatcctaacatcttgctgggcatgcagacaacggtacacattgcggagctagtcaaggcatgtcatccgtcacccgatgttgtgagcgctgtaggggagcacctgaactggctcaacaaactcttactcccacttaaggaatcgactcagttgcaaggaagcgagtcgtacaaggagtgccttgcactcttgggtcgtgttcacgctgcgatgaagatggtgagaattggcttagtagtgccccagctgcaatacagaatgtacggtagcctcatcaaccaaatggcccaagtagcacaaaactacgaccgagaattcaagcaattcaaattattcatcatccaaaatcaaatccttggcagctatttgctgcagcagaacagggcatttgctgagagggagctgcagatggagagctttcatgctgctgtcatttctcaaagaagggaggagttggacaatacattcgcaaagatggaccgactgagcttgcagatggaggaagaggacagagcaatggagcaagcccgaaaagaaatggaagaaggattgaagcagttccagaatgagcaagttgcaagggctgtgttcgctgttcttaaatctgtagctatgattgcgctcgcattcgtcacggctggtgcaacggctcctggggctgcagcatctgcagcgcaagctgtgaacatagccggtcaagcggcacaagctctgcgaagggtggtggaaattctagaggggctcgaggctgtgatggaggttgtggctgctataaagcaccttgtggatgctctggaccaggtaagtcagattgtggatgcaccacctatgccagacatgccctcggaggcggactggagtatttttgtgaatgagattgaagccgtggcagaggggatgccgacggaagtctcggaggttccggcgtggaaggccaagtgcaagaatgtggctgcactgggtcgggagatgagcatcacggcagtacagatgtcggagctgcagtatgacatctgggtgcaaggcatgatgcgggatatggctcgaagccaggcagacaggctggccgcaattcaacccgcggaccttaccaactatttggagatggctacccagatggatatgcggactacgaggatgctgctggggctcctcaacatattgcgcatccagaatgcggcgctcaggtacgagtatcttctaatgcccacggagctcacaacatggccactgggtatggataccgtgggtgacttgctcatcgcgcaggagaatgctgcactgataggattaatgcagctagggccctcatctgatttcacgagcaggcatgtggtgaaagacatacctgtgaacttgctgctcgatggcgaggattgggagtttgagattcctgtgcaagctggcatgtccagcttcccttccagctggtctcgcgtccgtattcggcacctggagatgcactttgtgaaggaggccagcggtattggtggtgagattatccaccagcctaccacccagactgggaccgtttacatccttctgcagggttccactatcttccatgaccgcagaagagaccaggtgttgccttttcaggccgctgctccgctcaactaccattacgcgtaccgcctcgacaccggcgactccactctcacaaacgaaccctctgaacagtttgccaacaagttcatgcagatgacacccttcacccgttggaggcttcgtctgtctgcgtccgcaaaagagaatgcaggattagcctttcccacggctacagcacttgactccactacccagattgtcatcactttccatgttacggccatcagacaaattgactggcggcacgacgaagag

SEQ ID NO: 453 - DNA, 2598 bp, Artificial Sequence
  Synthetic
atggctctcgtggattacggcaagcttttcgaggatctgaaccagataagcatgggtgtactggatcgggtagagttttcagaggtgatggtgatccacaggatgtatgtgaggctagctgatctgaatgtggggcagctcgagggagccgagaaagtgaagcggttgtatgtgtttgcggacgtggtggagctaccagtcgtggaatggcggtggccgccgcaaataccaggatcggtgacggtgatcatattgtgtcgtcttcttcaatggccaactgatgggaggcagtcggacaccgagctccacctgacattcatgaagttgcatgccatacaacgagaggaaaatcggtgggagataaccgcagcagatggcatgaactggggagtttacatacacgcagaggaagtacaggttggcgtgctgacaatgtcatggtcttcggtacttagagtttcggcacttcgctctgttataacctccggctttcgcgccgttagtgtgtttgaggtaccgggaagtgtaaggtccacccttggagctactttaaggcccgatcacgccttatatagtacaactatgcaagccacacccaacgcatcgcatattagtgcttttaaccttcgcatagtttccccgtcggcatatcgtgtttgtcctctccaaaatgacacagatacctacttaggtattccagcagacgtggcggcagttcttccagtagacgtggtgactgatcctaacatcttgctgggcatgcagacaacggtacacattgcggagctagtcaaggcatgtcatccgtcacccgatgttgtgagcgctgtaggggagcacctgaactggctcaacaaactcttactcccacttaaggaatcgactcagttgcaaggaagcgagtcgtacaaggagtgccttgcactcttgggtcgtgttcacgctgcgatgaagatggtgagaattggcttagtagtgccccagctgcaatacagaatgtacggtagcctcatcagacaaatggcccaggtagcacagaactacgaccaagatttcaggcagctcaagttattcattgcccaaaaccaaatccttggcagctatttgctgcagcagaacaaggcctttgctgacagagaggtgcagatggagagctttcattcagcggtcatttctcaaagaagggaggagttggacgacgccatcgctaagatggaccgactgagcttgcagatggaggaagaggacagagcaatggagcaagcccgaaaagaaatggaagaaggattgaagcagttccagaatgagcaagttgcaagggctgtgttcgctgttcttaaatctgtagctatgattgcgctcgcattcgtcacggctggtgcaacggctcctggggctgcagcatctgcagcgcaagctgtgaacatagccggtcaagcggcacaagctctgcgaagggtggtggaaattctagaggggctcgaggctgtgatggaggttgtggctgctataaagcaccttgtggatgctctggaccaggtaagtcagattgtggatgcaccgcctatgccagacatgccctcggaggcggactggagtatttttgtgaatgagattgaagccgtggcagaggggatgccgacggaagtctcggaggttccggcgtggaaggccaagtgcaagaatgtggctgcactgggtcgggagatgagcatcacggcagtacagatgtcggagctgcagtatgacatctgggtgcaaggcatgatgcgggatatggctcgaagccaggcagacaggctggccgcaattcaacccgcggaccttaccaactatttggagatggcaatacagatggatatgcggactacgaggatgctgctggggctcctcaacatattgcgcatccagaatgcggcgctcaggtacgagtatcttctaatgcccacggagctcacaacatggccactgggtatggataccgtgggtgacttgctcatcgcgcaggagaatgctgcactgataggattaatgcagctagggcccccatcggacttcacgagcaggcatgtagtgaaaggcatacctgtgagcttgcttctagacggtggggattgggaatttgagattcctgtgcaaggtggcatgtccagtttcccttccagctggactcgagtgcggattcggcacctggagatgcactttgtgcaggaggcgagcggtggcggtgagattatccaccagcctaccacccagactgggaccgtttacatccttctgcagggttccactatcttccatgaccgcagaagagaccaggtgttgccttttcaggccgctgctccgctcaactaccattacgcgtaccgcctcgacaccggcgactccactctcacaaacgaaccctctgaacagtttgccaacaagttcatgcagatgacacccttcacccgttggaggcttcgtctgtctgcgtccgcagcggagaataaaggattagcctttcccacagctacagctcccgactccaccactgagattgccatcactttccatgttacggccattagacaaattgactggcggcaagaggaggag

SEQ ID NO: 454 - DNA, 2553 bp, Artificial Sequence; identical to SEQ ID NO: 432
  Synthetic

SEQ ID NO: 455 - DNA, 2559 bp, Artificial Sequence; identical to SEQ ID NO: 442
  Synthetic

SEQ ID NO: 456 - DNA, 2556 bp, Artificial Sequence
  Synthetic
atggattacagcacgctttacagggatctgaaccagataagcatgcccctggatcgggtagagttctcagaggtgatggtaatccacaggatgtacttgaggttatctgatctgaatgtgggggagctccccggagccgagagggtgaagcggttgtatgtgttggcagacgtggtggagctcgcaacatttgcgcatccacagttgcttaatacgcggatgccaggatcggtgacggtgatcattctgtgtcgtcttcttcagtttccaactgatgggtcgttcgctgcttggctcgagctgccgttcatggagttgcacacactcatagaacaatacaggtcagagataaaagcagcagatgacgcgaaatggggaacgtatgtacacgcggaggaagtacagctcagcccgctgtttaatgggtggccttatctggttgttgaggcacagcgctgtattataaccgcggccatgcacaatacatttaaccgccctgggtgggttcgctccattactcaatttacaactgatcagtccggtcgggtagataccacactgctcgcacgaacagaattcggccatattgatctaccactcgaaacagattccccaacggcattcagtgtttcacaccgccaaagtacgaatttgcccgtagagtacaccggtattccagtggaggtggtgaccgatcctaacatcttgatgggcatgcaaaccagcgtgcacattgcggagctagtgaaggcatgttacccgtcaccagaattagtgagcgctgtaggggtgcacgtgaattggctcaacgaagtcttgctccgagttgtccagaaggaatctcagttgcaagggaccgaggcctacaacgagtgccttgcgcttttaggtcgcattcaatgtgtcatgaagatggggccgtttgtctcggtagtgccgcagctgcaatacagaatgtatggtagcctcatcagacaaatggcccaggtagcacagaactacgaccaagatttcaggcagctcaagttattcattgcccaaaaccaaatccttggcagctatttgctgcagcagaacaaggcctttgctgacagagaggtgcagatggagagctttcattcagcggtcatttctcaaagaaggcaggagttggacgacgccatcgctaagatggaccgactgagcttgcagatggaggaagaggacagagcaatggagcaagcccgaaaagaaatggaagaaggattgaagcagttccagaatgagcaagttgcaagggctgtgttcgctgttcttaaatctgtagctatgattgcgctcgcattcgtcacggctggtgcaacggctcctggagctgtggcgtcggcggggcaagctgtgagcatagcaggtcaggcggcgcaaggtctgcgaagggtggtggaaattctagagcagctggaggctgtgatggaggttgtggctgctgtgaaggacctcgtggattcattggaacaggtaggtcagattgtggacgcaccggtgatgccggaattgccctcagaggcggactggtccatttttgtgaacgaggtggaggccgtggcagaggggatgccgacggaagtctcggaggttccggtgtggagggccaagtgcaagaatgtggctgcactgggtagggagatgtgcatcacggcagaacagatttcccagctccagtatgacatctgggtgcaaggcttgttgcgggatatagctcaaagccacgcagaccggctggcagcgattcaacctgctaatcttaccaactatttggagatggcaatacagatggatatgcggactacgaggatactgatagggctcctcaacataatgcgcatccagaatgcggcacttatgtatgagtaccttctaacgcccacgcagctcactgcatggccgctgagaatggatactgtggccaacttgctcatcacgcacgagagtgctgcactgtcaggattagctcagttagggcccccatcggacttcacgagcaggcatgtagtgaaaggcatacctgtgagcttgcttctagacggtggggattgggaatttgagattcctgtgcaaggtggcatgtccagtttcccttccagctggactcgagtgcggattcggcacctggagatgcactttgtgcaggaggcgagcggtggcggcgagattatccaccagcctgccacccagacggggaccgtttacatccttctgcagggttccactatcttccatgaccgcagaagagaccaggtgttgccttttcaggccgctgctccgctcaactaccattacgcgtaccgcctcgacaccggcgactccactctcacaaacgaaccctctgaacagtttgccaacaagttcatgcagatgacacccttcacccgttggaggcttcgtctgtctgcgtccgcaaaagagaatgcaggattagcctttcccacggctacagcacttgactccactacccagattgtcatcactttccatgttacggccatcagacaaattgactggcggcacgacgaagag

SEQ ID NO: 457 - DNA, 2556 bp, Artificial Sequence
  Synthetic
atggattacagcacgctttacagggatctgaaccagataagcatgcccctggatcgggtagagttctcagaggtgatggtaatccacaggatgtatgtgaggctagctgatctgaatgtggggcagctccccggagccgagagggtgaagcggttgtatgtgttggcagacgtggtggagctcgcaacatttgcgcatccacagttgcttaatacgcggatgccaggatcggtgacggtgatcattctgtgtcgtcttcttcagtttccaactgatgggtcgttcgctgcttggctcgagctgccgttcatggagttgcacacactcatagaacaatacaggtcagagataaaagcagcagatgacgcgaaatggggaacgtatgtacacgcggaggaagtacagctcagcccgctgtttaatgggtggccttatctggttgttgaggcacagcgctgtattataaccgcggccatgcacaatacatttaaccgccctgggtgggttcgctccattactcaatttacaactgatcagtccggtcgggtagataccacactgctcgcacgaacagaattcggccatattgatctaccactcgaaacagattccccaacggcattcagtgtttcacaccgccaaagtacgaatttgcccgtagagtacaccggtattccagtggaggtggtgaccgatcctaacatcttgatgggcatgcaaaccagcgtgcacattgcggagctagtcaaggcatgtcatccgtcacccgatgttgtgagcgctgtaggggtgcacgtgaattggctcaacgaagtcttgctccgagttgtccagaaggaatctcagttgcaagggaccgaggcctacaacgagtgccttgcgcttttaggtcgcattcaatgtgtcatgaagatggggccgtttgtctcggtagtgccccagctgcaatacagaatgtacggtagcctcatcaaccaaatggcccaagtagcacaaaactacgaccgagaattcaagcaattcaaattattcatcatccaaaatcaaatccttggcagctatttgctgcagcagaacagggcatttgctgagagggagctgcagatggagagctttcatgctgctgtcatttctcaaagaagggaggagttggacaatacattcgcaaagatggaccgattgagcgggcaaatggaggcagagagtagtgcaatggagcaagccaaaaaggaaatggacgaaggattgaggcagttccagaataggcaagttgcgaacgccctctttgccgttcttagcgctgtagctcagattgggcttgcattccttacggctggtgcaacggctcctggggctgcagcatctgcagcgcaagctgtgaacatagccggtcaagcggcgcaaggtctgcgaagggtggtggaaattctagagcagctggaggctgtgatggaggttgtggctgctgtgaaggacctcgtggattcattggaacaggtaggtcagattgtggacgcaccggtgatgccggaattgccctcagaggcggactggtccatttttgtgaacgaggtggaggccgtggcagagggcatgccaacggaagtctcggaggttccggtgtggaaggccaagtgcaagaatgtggctgcactgggtcgggagatgagcatcacggcagtacagatgtcggagctgcagtatgacatctgggtgcaaggcatgatgcgggatatagctcaaagccacgcagaccggctggcagcgattcaacctgctaatcttaccaactatttggagatggcaatacagatggatatgcggactacgaggatactgatagggctcctcaacatattgcgcatccagaatgcggcgctcaggtacgagtatcttctaatgcccacggagctcacaacatggccactgggtatggatactgtggccaacttgctcatcacgcacgagagtgctgcactgtcaggattagctcagttagggcccccatcggacttcacgagcaggcatgtagtgaaaggcatacctgtgagcttgcttctagacggtggggattgggaatttgagattcctgtgcaaggtggcatgtccagtttcccttccagctggactcgagtgcggattcggcacctggagatgcactttgtgcaggaggcgagcggtggcggcgagattatccaccagcctgccacccagacggggaccatttacatcctcctgcagggctccactgtcttccatgatcgcagaagggaggaggtgatgacctttcaggcagcggttccgctcaactaccattacgcgtaccgcctcgacaccggcgactccactctcacaaacgaaccctctgaacagtttgccaacaagttcatgcagatgacacccttcacccgttggaggcttcgtctgtctgcgtccgcagcggagaataaaggattagcctttcccacagctacagctcccgactccaccactgagattgccatcactttccatgttacggccattagacaaattgactggcggcacgacgaagag

SEQ ID NO: 458 - DNA, 2556 bp, Artificial Sequence
  Synthetic
atggattacagcacgctttacagggatctgaaccagataagcatgcccctggatcgggtagagttctcagaggtgatggtaatccacaggatgtacttgaggttatctgatctgaatgtgggggagctccccggagccgagagggtgaagcggttgtatgtgtttgtggacgtggtggagctcgcaacatttgcgcatccacagttgcttaatacgcggatgccaggatcggtgacggtgatcattctgtgtcgtcttcttcagtttccaactgatgggtcgttcgctgcttggctcgagctgccgttcatggagttgcacacactcatagaacaatacaggtcagagataaaagcagcagatgacgcgaaatggggaacgtatgtacacgcggaggaagtacagctcagcccgctgtttaatgggtggccttatctggttgttgaggcacagcgctgtattataaccgcggccatgcacaatacatttaaccgccctgggtgggttcgctccattactcaatttacaactgatcagtccggtcgggtagataccacactgctcgcacgaacagaattcggccatattgatctaccactcgaaacagattccccaacggcattcagtgtttcacaccgccaaagtacgaatttgcccgtagagtacaccggtattccagtggaggtggtgaccgatcctaacatcttgatgggcatgcaaaccagcgtgcacattgcggagctagtgaaggcatgttacccgtcaccagaattagtgagcgctgtaggggtgcacgtgaattggctcaacgaagtcttgctccgagttgtccagaaggaatctcagttgcaagggaccgaggcctacaacgagtgccttgcgcttttaggtcgcattcaatgtgtcatgaagatggggccgtttgtctcggtagtgccccagctgcaatacagaatgtacggtagcctcatcaaccaaatggcccaggtagcacagaactacgaccaagatttcaggcagctcaagttattcattgcccaaaaccaaatccttggcagctatttgctgcagcagaacaaggcctttgctgacagagaggtgcagatggagagctttcattcagcggtcatttctcaaagaaggcaggagttggacgacgccatcgctaagatggaccgactgagcttgcagatggaggcagagagtagtgcaatggagcaagccaaaaaggaaatggacgaaggattgaggcagttccagaataggcaagttgcgaacgccctctttgccgttcttagcgctgtagctcagattgggcttgcattccttacggctggtgcaacggctcctggagctgtggcgtcggcggggcaagctgtgagcatagcaggtcaggcggcgcaaggtctgcgaagggtggtggaaattctagagcagctggaggctgtgatggaggttgtggctgctgtgaaggacctcgtggattcattggaacaggtaggtcagattgtggacgcaccggtgatgccggaattgccctcagaggcggactggtccatttttgtgaacgaggtggaggccgtggcagagggcatgccaacggaagtctcggaggttccggtgtggagggccaagtgcaagaatgtggctgcactgggtcgggagatgagcatcacggcagtacagatgtcggagctgcagtatgacatctgggtgcaaggcatgatgcgggatatggctcgaagccaggcagacaggctggccgcaattcaacccgcggaccttaccaactatttggagatggctacccagatggatatgcggactacgaggatactgatagggctcctcaacataatgcgcatccagaatgcggcacttatgtatgagtaccttctaacgcccacgcagctcactgcatggccgctgagaatggatactgtggccaacttgctcatcacgcacgagagtgctgcactgtcaggattagctcagttagggcccccatcggacttcacgagcaggcatgtggtgaaagacatacctgtgaacttgctgctcgatggcgaggattgggagtttgagattcctgtgcaagctggcatgtccagcttcccttccagctggtctcgcgtccgtattcggcacctggagatgcactttgtgaaggaggccagcggtggcggcgagattatccaccagcctgccacccagacggggaccatttacatcctcctgcagggctccactgtcttccatgatcgcagaagggaggaggtgatgacctttcaggcagcggttccgctcaactaccattacgcgtaccgcctcgacactggagaagccactcttacgaacgagccctcggaacagtttgccaacacattcatgcagatgacaccgttcactcactggaggctacgtctgtctgcgtccgcagcggagaataaaggattagcctttcccacggctacagcacttgactccactacccagattgtcatcactttccatgttacggccattagacaaattgactggcggcacgaggaggag

SEQ ID NO: 459 - DNA, 2569 bp, Artificial Sequence
  Synthetic
atggctctcgtggattacggcaagcttttcgaggatctgaaccagataagcatgcccctggatcgggtagagttctcagaggtgatggtaatccacaggatgtacttgaggttatctgatctgaatgtgggggagctccccggagccgagagggtgaagcggttgtatgtgtttgcggacgtggtggagctcgcaacatttgcgcatccacagttgcttaatacgcggatgccaggatcggtgacggtgatcattctgtgtcgtcttcttcagtttccaactgatgggtcgttcgctgcttggctcgagctgccgttcatggagttgcacacactcatagaacaatacaggtcagagataaaagcagcagatgacgcgaaatggggaacgtatgtacacgcggaggaagtacagctcagcccgctgtttaatgggtggccttatctggttgttgaggcacagcgctgtattataaccgcggccatgcacaatacatttaaccgccctgggtgggttcgctccattactcaatttacaactgatcagtccggacgggtagataccacactgctcgcacgaacagaattcggccatattgatctaccactcgaaacagattccccaacggcattcagtgtttcacaccgccaaagtacgaatttgcccgtagagtacaccggtattccagtggaggtggtgaccgatcctaacatcttgatgggcatgcaaaccagcgtgcacattgcggagctagtgaaggcatgttacccgtcaccagaattagtgagcgctgtaggggtgcacgtgaattggctcaacgaagtcttgctccgagttgtccagaaggaatctcagttgcaagggaccgaggcctacaacgagtgccttgcgcttttaggtcgcattcaatgtgtcatgaagatggggccgtttgtctcggtagtgccccagctgcaatacagaatgtacggtagcctcatcaaccaaatggcccaagtagcacaaaactacgaccgagaattcaagcaattcaaattattcatcatccaaaatcaaatccttggcagctatttgctgcagcagaacagggcatttgctgagagggagctgcagatggagagctttcatgctgctgtcatttctcaaagaagggaggagttggacaatacattcgcaaagatggaccgattgagcgggcaaatggaggcagagagtagtgcaatggagcaagccaaaaaggaaatggacgaaggattgaggcagttccagaataggcaagttgcgaacgccctctttgccgttcttagcgctgtagctcagattgggcttgcattccttacggctggtgcaacggctcctggggctgcagcatctgcagcgcaagctgtgaacatagccggtcaagcggcacaagctctgcgaagggtggtggaaattctagaggggctcgaggctgtgatggaggttgtggctgctataaagcaccttgtggatgctctggaccaggtaagtcagattgtggatgcaccacctatgccagacatgccctcggaggcggactggagtatttttgtgaatgagattgaagccgtggcagaggggatgccgacggaagtctcggaggttccggcgtggaaggccaagtgcaagaatgtggctgcactgggtagggagatgtgcatcacggcagaacagatttcccagctccagtatgacatctgggtgcaaggcttgttgcgggatatagctcaaagccacgcagaccggctggcagcgattcaacctgctaatcttaccaactatttggagatggcaatacagatggatatgcggactacgaggatactgatagggctcctcaacataatgcgcatccagaatgcggcacttatgtatgagtaccttctaacgcccacgcagctcactgcatggccgctgagaatggatactgtggccaacttgctcatcacgcacgagagtgctgcactgtcaggattagctcagttagggcccccatcggacttcacgagcaggcatgtggtgaaaggcatacctgtgagcttgcttctagacggtggggattgggaatttgagattcctgtgcaaggtggcatgtccagtttcccttccagctggactcgagtgcggattcggcacctggagatgcactttgtgcaggaggcgagcggtggcggcgagattatccaccagcctgccacccagacggggaccatttacatcctcctgcagggctccactgtcttccatgatcgcagaagggaggaggtgatgacctttcaggcagcggttccgctcaactaccattacgcgtaccgcctcgacactggagaagccactctcacaaacgaaccctctgaacagtttgccaacaagttcatgcagatgacacccttcacccgttggaggcttcgtctgtctgcgtccgcaaaagagaatgcaggattagcctttcccacggctacagcacttgactccactacccagattgtcatcactttccatgttacggccatcagacaaattgactggcggcacgacgaagagtagc

SEQ ID NO: 460 - DNA, 2556 bp, Artificial Sequence
  Synthetic
atggattacagcacgctttacagggatctgaaccagataagcatgcccctggatcgggtagagttctcagaggtgatggtaatccacaggatgtacttgaggttatctgatctgaatgtgggggagctccccggagccgagagggtgaagcggttgtatgtgttggcagacgtggtggagctcgcaacatttgcgcatccacagttgcttaatacgcggatgccaggatcggtgacggtgatcattctgtgtcgtcttcttcagtttccaactgatgggtcgttcgctgcttggctcgagctgccgttcatggagttgcacacactcatagaacaatacaggtcagagataaaagcagcagatgacgcgaaatggggaacgtatgtacacgcggaggaagtacagctcagcccgctgtttaatgggtggccttatctggttgttgaggcacagcgctgtattataaccgcggccatgcacaatacatttaaccgccctgggtgggttcgctccattactcaatttacaactgatcagtccggtcgggtagataccacactgctcgcacgaacagaattcggccatattgatctaccactcgaaacagattccccaacggcattcagtgtttcacaccgccaaagtacgaatttgcccgtagagtacaccggtattccagtggaggtggtgaccgatcctaacatcttgatgggcatgcaaaccagcgtgcacattgcggagctagtgaaggcatgtcatccgtcaccagaattagtgagcgctgtaggggtgcacgtgaattggctcaacgaagtcttgctccgagttgtccagaaggaatctcagttgcaagggaccgaggcctacaacgagtgccttgcgcttttaggtcgcattcaatgtgtcatgaagatggggccgtttgtctcggtagtgccgcagctgcaatacagaatgtatggtagcctcatcagacaaatggcccaggtagcacagaactacgaccaagatttcaggcagctcaagttattcattgcccaaaaccaaatccttggcagctatttgctgcagcagaacaaggcctttgctgacagagaggtgcagatggagagctttcatgctgctgtcatttctcaaagaagggaggagttggacgacgccatcgctaagatggaccgactgagcttgcagatggaggaagaggacagagcaatggagcaagcccgaaaagaaatggaagaaggattgaagcagttccagaatgagcaagttgcaagggctgtgttcgctgttcttagcgctgtagctcagattgggcttgcattccttacggctggtgcaacggctcctggagctgcagcatctgcagcgcaagctgtgaacatagccggtcaagcggcacaagctctgcgaagggtggtggaaattctagaggggctcgaggctgtgatggaggttgtggctgctataaagcaccttgtggatgctctggaccaggtaagtcagattgtggatgcaccacctatgccagacatgccctcggaggcggactggagtatttttgtgaatgagattgaagccgtggcagaggggatgccgacggaagtctcggaggttccggcgtggaaggccaagtgcaagaatgtggctgcactgggtagggagatgtgcatcacggcagaacagatttcccagctccagtatgacatctgggtgcaaggcttgttgcgggatatagctcaaagccacgcagaccggctggcagcgattcaacctgctaatcttaccaactatttggagatggcaatacagatggatatgcggactacgaggatactgatagggctcctcaacataatgcgcatccagaatgcggcacttatgtatgagtaccttctaacgcccacgcagctcactgcatggccgctgagaatggatactgtggccaacttgctcatcacgcacgagagtgctgcactgtcaggattagctcagttagggcccccatcggacttcacgagcaggcatgtagtgaaaggcatacctgtgagcttgcttctagacggtggggattgggaatttgagattcctgtgcaaggtggcatgtccagtttcccttccagctggactcgagtgcggattcggcacctggagatgcactttgtgcaggaggcgagcggtggcggcgagattatccaccagcctgccacccagacggggaccatttacatcctcctgcagggctccactgtcttccatgatcgcagaagggaggaggtgatgacctttcaggcagcggttccgctcaactaccattacgcgtaccgcctcgacactggagaagccactcttacgaacgagccctcggaacagtttgccaacacattcatgcagatgacaccgttcactcactggaggcttcgtctgtccgcgtccgcaaaagagaatgcaggattagcctttcccacggctacagcacttgactccactacccagattgtcatcactttccatgttacggccatcagacaaattgactggcggcacgacgaagag

SEQ ID NO: 461 - DNA, 2556 bp, Artificial Sequence
  Synthetic
atggattacagcacgctttacagggatctgaaccagataagcatgcccctggatcgggtagagttctcagaggtgatggtaatccacaggatgtacttgaggttatctgatctgaatgtgggggagctccccggagccgagagggtgaagcggttgtatgtgttggcagacgtggtggagctcgcagcatttgcgcatccacagttgcttaatacgcggatgccaggatcggtgacggtgatcattctgtgtcgtcttcttcagtttccaactgatgggtcgttcgctgcttggctcgagctgccgttcatggagttgcacacactcatagaacaatacaggtcagagataaaagcagcagatgacgcgaaatggggaacgtatgtacacgcggaggaagtacagctcagcccgctgtttaatgggtggccttatctggttgttgaggcacagcgctgtattataaccgcggccatgcacaatacatttaaccgccctgggtgggttcgctccattactcaatttacaactgatcagtccggtcgggtagataccacactgctcgcacgaacagaattcggccatattgatctaccactcgaaacagattccccaacggcattcagtgtttcacaccgccaaagtacgaatttgcccgtagagtacaccggtattccagtggaggtggtgaccgatcctaacatcttgatgggcatgcaaaccagcgtgcacattgcggagctagtgaaggcatgttacccgtcaccagaattagtgagcgctgtaggggtgcacgtgaattggctcaacgaagtcttgctccgagttgtccagaaggaatctcagttgcaagggaccgaggcctacaacgagtgccttgcgcttttaggtcgcattcaatgtgtcatgaagatggggccgtttgtctcggtagtgccgcagctgcaatacagaatgtatggtagcctcatcagacaaatggcccaggtagcacagaactacgaccaagatttcaggcagctcaagttattcattgcccaaaaccaaatccttggcagctatttgctgcagcagaacaaggcctttgctgacagagaggtgcagatggagagctttcattcagcggtcatttctcaaagaaggcaggagttggacaatacattcgcaaagatggaccgattgagcgggcaaatggaggcagagagtagtgcaatggagcaagccaaaaaggaaatggacgaaggattgaggcagttccagaataggcaagttgcgaacgccctctttgccgttcttagcgctgtagctcagattgggcttgcattccttacggctggtgcaacggctcctggagctgtggcgtcggcggggcaagctgtgagcatagcaggtcaggcggcgcaaggtctgcgaagggtggtggaaattctagagcagctggaggctgtgatggaggttgtggctgctgtgaaggacctcgtggattcattggaacaggtaggtcagattgtggacgcaccggtgatgccggaattgccctcagaggcggactggtccatttttgtgaacgaggtggaggccgtggcagagggcatgccaacggaagtctcggaggttccggtgtggagggccaagtgcaagaatgtggctgcactgggtcgggagatgagcatcacggcagtacagatgtcggagctccagtatgacatctgggtgcaaggcttgttgcgggatatagctcaaagccacgcagaccggctggcagcgattcaacctgctaatcttaccaactatttggagatggcaatacagatggatatgcggactacgaggatgctgctggggctcctcaacataatgcgcatccagaatgcggcacttatgtatgagtatcttctaatgcccacggagctcacaacatggccactgggtatggataccgtgggtgacttgctcatcgcgcaggagaatgctgcactgataggattaatgcagctagggccctcatctgatttcacgagcaggcatgtggtgaaagacatacctgtgaacttgctgctcgatggcgaggattgggaatttgagattcctgtgcaaggtggcatgtccagtttcccttccagctggactcgagtgcggattcggcacctggagatgcactttgtgcaggaggcgagcggtggcggtgagattatccaccagcctaccacccagactgggaccgtttacatccttctgcagggctccactgtcttccatgatcgcagaagggaggaggtgatgacctttcaggcagcggttccgctcaactaccattacgcgtaccgcctcgacactggagaagccactcttacgaacgagccctcggaacagtttgccaacacattcatgcagatgacaccgttcactcactggaggctacgtctgtctgcgtccgcagcggagaataaaggattagcctttcccacggctacagcacttgactccactacccagattgtcatcactttccatgttacggccattagacaaattgactggcggcaagaggaggag

SEQ ID NO: 462 - DNA, 2559 bp, Artificial Sequence
  Synthetic
atggattacagcacgctttacagggatctgaaccagataagcatgcccctggatcgggtagagttctcagaggtgatggtaatccacaggatgtacttgaggttatctgatctgaatgtgggggagctccccggagccgagagggtgaagcggttgtatgtgttggcagacgtggtggagctcgcaacatttgcgcatccacagttgcttaatacgcggatgccaggatcggtgacggtgatcattctgtgtcgtcttcttcagtttccaactgatgggtcgttcgctgcttggctcgagctgccgttcatggagttgcacacactcatagaacaatacaggtcagagataaaagcagcagatgacgcgaaatggggaacgtatgtacacgcggaggaagtacagctcagcccgctgtttaatgggtggccttatctggttgttgaggcacagcgctgtattataaccgcggccatgcacaatacatttaaccgccctgggtgggttcgctccattactcaatttacaactgatcagtccggtcgggtagataccacactgctcgcacgaacagaattcggccatattgatctaccactcgaaacagattccccaacggcattcagtgtttcacaccgccaaagtacgaatttgcccgtagagtacaccggtattccagtggaggtggtgaccgatcctaacatcttgatgggcatgcaaaccagcgtgcacattgcggagctagtgaaggcatgttacccgtcacccgatgttgtgagcgctgtaggggagcacctgaactggctcaacgaagtcttgctccgagttgtccagaaggaatcgactcagttgcaaggaagcgagtcgtacaaggagtgccttgcactcttgggtcgtgttcacgctgcgatgaagatggtgagaattggcttagtagtgccccagctgcaatacagaatgtacggtagcctcatcaaccaaatggcccaagtagcacaaaactacgaccgagaattcaagcaattcaaattattcatcatccaaaatcaaatccttggcagctatttgctgcagcagaacagggcatttgctgagagggagctgcagatggagagctttcatgctgctgtcatttctcaaagaaggcaggagttggacgacgccatcgcaaagatggaccgattgagcgggcaaatggaggcagagagtagtgcaatggagcaagccaaaaaggaaatggacgaaggattgaggcagttccagaataggcaagttgcgaacgccctctttgccgttcttagcgctgtagctcagattgggcttgcattccttacggctggtgcaacggctcctggagctgtggcgtcggcggggcaagctgtgagcatagcaggtcaggcggcgcaaggtctgcgaagggtggtggaaattctagagcagctggaggctgtgatggaggttgtggctgctgtgaaggacctcgtggattcattggaacaggtaggtcagattgtggacgcaccggtgatgccggaattgccctcagaggcggactggtccatttttgtgaacgaggtggaggccgtggcagaggggatgccgacggaagtctcggaggttccggcgtggaaggccaagtgcaagaatgtggctgcactgggtagggagatgtgcatcacggcagaacagatttcccagctccagtatgacatctgggtgcaaggcttgttgcgggatatagctcaaagccacgcagaccgactggcagcgattcaacctgctaatcttaccaactatttggagatggcaatacagatggatatgcggactacgaggatactgatagggctcctcaacataatgcgcatccagaatgcggcacttatgtatgagtaccttctaacgcccacggagctcacaacatggccactgggtatggataccgtgggtgacttgctcatcgcgcaggagaatgctgcactgataggattaatgcagctagggccctcatctgatttcacgagcaggcatgtagtgaaaggcatacctgtgagcttgcttctagacggtggggattgggaatttgagattcctgtgcaaggtggcatgtccagtttcccttccagctggactcgagtgcggattcggcacctggagatgcactttgtgcaggaggcgagcggtggcggcgagattatccaccagcctgccacccagacggggaccatttacatcctcctgcagggctccactgtcttccatgatcgcagaagggaggaggtgatgacctttcaggcagcggttccgctcaactaccattacgcgtaccgcctcgacactggagaagccactcttacgaacgagccctcggaacagtttgccaacacattcatgcagatgacaccgttcactcactggaggctacgtctgtctgcgtccgcaaaagagaatgcaggattagcctttcccacggctacagcacttgactccactacccagattgtcatcactttccatgttacggccatcagacaaattgactggcggcaagaggaggag

SEQ ID NO: 463 - DNA, 2562 bp, Artificial Sequence
  Synthetic
atggattacagcacgctttacagggatctgaaccagataagcatgggtgtactggatcgggtagagttttcagaggtgatggtaatccacaggatgtacttgaggttatctgatctgaatgtgggggagctccccggagccgagagggtgaagcggttgtatgtgttggcagacgtggtggagctcgcaacatttgcgcatccacagttgcttaatacgcggatgccaggatcggtgacggtgatcattctgtgtcgtcttcttcagtttccaactgatgggtcgttcgctgcttggctcgagctgccgttcatgaagttgcacacactcatagaacaatacaggtcagagataaaagcagcagatgacgcgaaatggggaacgtatgtacacgcggaggaagtacagctcagcccgctgtttaatgggtggccttatctggttgttgaggcacagcgctgtattataaccgcggccatgcacaatacatttaaccgccctgggtgggttcgctccattactcaatttacaactgatcagtccggtcgggtagataccacactgctcgcacgaacagaattcggccatattgatctaccactcgaaacagattccccaacggcattcagtgtttcacaccgccaaagtacgaatttgcccgtagagtacaccggtattccagtggaggtggtgaccgatcctaacatcttgatgggcatgcaaaccagcgtgcacattgcggagctagtgaaggcatgttacccgtcaccagaattagtgagcgctgtaggggtgcacgtgaattggctcaacgaagtcttgctccgagttgtccagaaggaatctcagttgcaagggaccgaggcctacaacgagtgccttgcgcttttaggtcgcattcaatgtgtcatgaagatggggccgtttgtctcggtagtgccgcagctgcaatacagaatgtatggtagcctcatcagacaaatggcccaagtagcacaaaactacgaccaagatttcaggcagctcaagttattcattgcccaaaaccaaatccttggcagctatttgctgcagcagaacaaggcctttgctgacagagaggtgcagatggagagctttcattcagcggtcatttctcaaagaaggcaggagttggacgacgccatcgctaagatggaccgactgagcttgcagatggaggaagaggacagagcaatggagcaagcccgaaaagaaatggaagaaggattgaagcagttccagaatgagcaagttgcaagggctgtgttcgctgttcttaaatctgtagctatgattgcgctcgcattcgtcacggctggtgcaacggctcctggggctgtggcgtcggcggggcaagctgtgagcatagcaggtcaggcggcgcaaggtctgcgaagggtggtggaaattctagaggggctcgaggctgtgatggaggttgtggctgctataaagcaccttgtggatgctctggaccaggtaagtcagattgtggatgcaccacctatgccagacatgccctcggaggcggactggagtatttttgtgaatgagattgaagccgtggcagaggggatgccgacggaagtctcggaggttccggtgtggagggccaagtgcaagaatgtggctgcactgggtcgggagatgagcatcacggcagtacagatgtcggagctgcagtatgacatctgggtgcaaggcatgatgcgggatatggctcgaagccaggcagacaggctggccgcaattcaacccgcggaccttaccaactatttggagatggctacccagatggatatgcggactacgaggatgctgctggggctcctcaacatattgcgcatccagaatgcggcgctcaggtacgagtatcttctaatgcccacggagctcacaacatggccactgagaatggatactgtggccaacttgctcatcacgcacgagagtgctgcactgtcaggattagctcagttagggccctcatctgatttcacgagcaggcatgtggtgaaagacatacctgtgaacttgctgctcgatggcgaggattgggagtttgagattcctgtgcaagctggcatgtccagcttcccttccagctggtctcgcgtccgtattcggcacctggagatgcactttgtgaaggaggccagcggtattggtggtgagattatccaccagcctaccacccagactgggaccgtttacatccttctgcagggctccactgtcttccatgatcgcagaagggaggaggtgatgacctttcaggcagcggttccgctcaactaccattacgcgtaccgcctcgacactggagaagccactcttacgaacgagccctcggaacagtttgccaacacattcatgcagatgacacccttcacccgttggaggcttcgtctgtctgcgtccgcaaaagagaatgcaggattagcctttcccacggctacagcacttgactccactacccagattgtcatcactttccatgttacggccatcagacaaattgactggcggcacgacgaagag

SEQ ID NO: 464 - DNA, 2560 bp, Artificial Sequence
  Synthetic
atggattacagcacgctttacagggatctgaaccagataagcatgcccctggatcgggtagagttctcagaggtgatggtaatccacaggatgtacttgaggttatctgatctgaatgtgggggagctccccggagccgagagggtgaagcggttgtatgtgttggcagacgtggtggagctcgcaacatttgcgcatccacagttgcttaatacgcggatgccaggatcggtgacggtgatcattctgtgtcgtcttcttcagtttccaactgatgggtcgttcgctgcttggctcgagctgccgttcatggagttgcacacactcatagaacaatacaggtcagagataaaagcagcagatgacgcgaaatggggaacgtatgtacacgcggaggaagtacagctcagcccgctgtttaatgggtggccttatctggttgttgaggcacagcgctgtattataaccgcggccatgcacaatacatttaaccgccctgggtgggttcgctccattactcaatttacaactgatcagtccggtcgggtagataccacactgctcgcacgaacagaattcggccatattgatctaccactcgaaacagattccccaacggcattcagtgtttcacaccgccaaagtacgaatttgcccgtagagtacaccggtattccagtggaggtggtgactgatcctaacatcttgctgggcatgcagacaacggtacacattgcggagctagtcaaggcatgtcatccgtcacccgatgttgtgagcgctgtaggggtgcacctgaactggctcaacaaactcttactcccacttaaggaatcgactcagttgcaaggaagcgaggcctacaacgagtgccttgcgcttttaggtcgcattcaatgtgtcatgaagatggggccgtttgtctcggtagtgccgcagctgcaatacagaatgtatggtagcctcatcagacaaatggcccaggtagcacagaactacgaccaagatttcaggcagctcaagttattcattgcccaaaaccaaatccttggcagctatttgctgcagcagaacaaggcctttgctgacagagaggtgcagatggagagctttcattcagcggtcatttctcaaagaaggcaggagttggacgacgccatcgctaagatggaccgactgagcttgcagatggaggaagaggacagagcaatggagcaagcccgaaaagaaatggaagaaggattgaagcagttccagaatgagcaagttgcaagggctgtgttcgctgttcttaaatctgtagctatgattgcgctcgcattcgtcacggctggtgcaacggctcctggggctgcagcatctgcagcgcaagctgtgagcatagcaggtcaggcggcgcaaggtctgcgaagggtggtggaaattctagagcagctggaggctgtgatggaggttgtggctgctgtgaaggacctcgtggattcattggaacaggtaggtcagattgtggacgcaccggtgatgccggaattgccctcagaggcggactggtccatttttgtgaacgaggtggaggccgtggcagagggcatgccaacggaagtctcggaggttccggcgtggaaggccaagtgcaagaatgtggctgcactgggtagggagatgtgcatcacggcagaacagatttcccagctccagtatgacatctgggtgcaaggcttgttgcgggatatagctcaaagccacgcagaccggctggcagcgattcaacctgctaatcttaccaactatttggagatggcaatacagatggatatgcggactacgaggatactgatagggctcctcaacataatgcgcatccagaatgcggcacttatgtatgagtaccttctaacgcccacgcagctcactacatggccactgggtatggataccgtgggtgacttgctcatcgtgcaggagaatgctgcactgataggattaatgcagctagggcccccatcggacttcacgagcaggcatgtagtgaaaggcatacctgtgagcttgcttctagacggtggggattgggaatttgagattcctgtgcaaggtggcatgtccagtttcccttccagctggactcgagtgcggattcggcacctggagatgcactttgtgcaggaggccagcggtattggtggtgagattatccaccagcctaccacccagactgggaccgtttacatccttctgcagggctccactgtcttccatgaccgcagaagagaccaggtgttgccttttcaggccgctgctccgctcaactaccattacgcgtaccgcctcgacaccggcgactccactctcacaaacgaaccctctgaacagtttgccaacaagttcatgcagatgacacccttcacccgttggaggcttcgtctgtctgcgtccgcaaaagagaatgcaggattagcctttcccacggctacagcacttgactccactacccagattgtcatcactttccatgttacggccatcagacaaattgactggcggcacgacgaagagtagc

SEQ ID NO: 465 - DNA, 2556 bp, Artificial Sequence
  Synthetic
atggattacagcacgctttacagggatctgaaccagataagcatgcccctggatcgggtagagttctcagaggtgatggtaatccacaggatgtacttgaggttatctgatctgaatgtgggggagctccccggagccgagagggtgaagcggttgtatgtgttggcagacgtggtggagctcgcaacatttgcgcatccacagttgcttaatacgcggatgccaggatcggtgacggtgatcattctgtgtcgtcttcttcagtttccaactgatgggtcgttcgctgcttggctcgagctgccgttcatggagttgcacacactcatagaacaatacaggtcagagataaaagcagcagatgacgcgaaatggggaacgtatgtacacgcggaggaagtacagctcagcccgctgtttaatgggtggccttatctggttgttgaggcacagcgctgtattataaccgcggccatgcacaatacatttaaccgccctgggtgggttcgctccattactcaatttacaactgatcagtccggtcgggtagataccacactgctcgcacgaacagaattcggccatattgatctaccactcgaaacagattccccaacggcattcagtgtttcacaccgccaaagtacgaatttgcccgtagagtacaccggtattccagtggaggtggtgaccgatcctaacatcttgatgggcatgcaaaccagcgtgcacattgcggagctagtgaaggcatgttacccgtcaccagaattagtaagcgctgtaggggtgcacgtgaattggctcaacgaagtcttgctccgagttgtccagaaggaatctcagttgcaagggaccgaggcctacaacgagtgccttgcgcttttaggtcgcattcaatgtgtcatgaagatggggccgtttgtctcggtagtgccgcagctgcaatacagaatgtatggtagcctcatcaaccaaatggcccaagtagcacaaaactacgaccgagaattcaagcaattcaaattattcatcatccaaaatcaaatccttggcagctatttgctgcagcagaacagggcatttgctgacagagaggtgcagatggagagctttcattcagcggtcatttctcaaagaagggaggagttggacgacgccatcgctaagatggaccgactgagcttgcagatggaggcagagagtagtgcaatggagcaagccaaaaaggaaatggaagaaggattgaagcagttccagaatgagcaagttgcaagggctgtgttcgctgttcttaaatctgtagctatgattgcgctcgcattcgtcacggctggtgcaacggctcctggggctgcagcatctgcagcgcaagctgtgagcatagcaggtcaggcggcgcaagctctgcgaagggtggtggaaattctagaggggctcgaggctgtgatggaggttgtggctgctgtgaaggacctcgtggatgctctggaccaggtaagtcagattgtggatgcaccacctatgccagacatgccctcggaggcggactggagtatttttgtgaatgagattgaagccgtggcagaggggatgccgacggaagtctcggaggttccggcgtggaaggccaagtgcaagaatgtggctgcactgggtagggagatgtgcatcacggcagaacagatttcccagctccagtatgacatctgggtgcaaggcttgttgcgggatatagctcgaagccaggcagacaggctggccgcaattcaacccgcggaccttaccaactatttggagatggctacccagatggatatgcggactacgaggatgctgctggggctcctcaacatattgcgcatccagaatgcggcgctcaggtacgagtatcttctaatgcccacggagctcacaacatggccactgggtatggataccgtgggtgacttgctcatcgcgcaggagaatgctgcactgataggattaatgcagctagggccctcatctgatttcacgagcaggcatgtggtgaaagacatacctgtgaacttgctgctcgatggcgaggattgggagtttgagattcctgtgcaagctggcatgtccagcttcccttccagctggtctcgcgtccgtattcggcacctggagatgcactttgtgcaggaggcgagcggtggcggcgagattatccaccagcctgccacccagacggggaccatttacatcctcctgcagggctccactgtcttccatgatcgcagaagggaggaggtgatgacctttcaggcagcggttccgctcaactaccattacgcgtaccgcctcgacactggagaagccactcttacgaacgagccctcggaacagtttgccaacacattcatgcagatgacaccgttcactcactggaggctacgtctgtctgcgtccgcagcggagaataaaggattagcctttcccacagctacagctcccgactccaccactgagattgccatcactttccatgttacggccattagacaaattgactggcggcaagaggaggag

SEQ ID NO: 466 - DNA, 2559 bp, Artificial Sequence
  Synthetic
atggattacagcacgctttacagggatctgaaccagataagcatgcccctggatcgggtagagttctcagaggtgatggtaatccacaggatgtacttgaggttatctgatctgaatgtgggggagctccccggagccgagagggtgaagcggttgtatgtgttggcagacgtggtggagctcgcaacatttgcgcatccacagttgcttaatacgcggatgccaggatcggtgacggtgatcattctgtgtcgtcttcttcagtttccaactgatgggtcgttcgctgcttggctcgagctgccgttcatggagttgcacacactcatagaacaatacaggtcagagataaaagcagcagatgacgcgaaatggggaacgtatgtacacgcggaggaagtacagctcagcccgctgtttaatgggtggccttatctggttgttgaggcacagcgctgtattataaccgcggccatgcacaatacatttaaccgccctgggtgggttcgctccattactcaatttacaactgatcagtccggtcgggtagataccacactgctcgcacgaacagaattcggccatattgatctaccactcgaaacagattccccaacggcattcagtgtttcacaccgccaaagtacgaatttgcccgtagagtacaccggtattccagtggaggtggtgaccgatcctaacatcttgatgggcatgcaaaccagcgtgcacattgcggagctagtgaaggcatgttacccgtcaccagaattagtgagcgctgtaggggtgcacgtgaattggctcaacgaagtcttgctccgagttgtccagaaggaatctcagttgcaagggaccgaggcctacaacgagtgccttgcgcttttaggtcgcattcaatgtgtcatgaagatggggccgtttgtctcggtagtgccgcagctgcaatacagaatgtatggtagcctcatcagacaaatggcccaggtagcacagaactacgaccaagatttcaggcagctcaagttattcattgcccaaaaccaaatccttggcagctatttgctgcagcagaacaaggcctttgctgacagagaggtgcagatggagagctttcattcagcggtcatttctcaaagaaggcaggagttggacgacgccatcgctaagatggaccgactgagcttgcagatggaggaagaggacagagcaatggagcaagcccgaaaagaaatggaagaaggattgaagcagttccagaatgagcaagttgcaagggctgtgttcgctgttcttaaatctgtagctatgattgcgctcgcattcgtcacggctggtgcaacggctcctggggctgcagcatctgcagcgcaagctgtgaacatagccggtcaagcggcacaagctctgcgaagggtggtggaaattctagaggggctcgaggctgtgatggaggttgtggctgctgtgaaggacctcgtggattcattggaacaggtaggtcagattgtggacgcaccggtgatgccggaattgccctcagaggcggactggagtatttttgtgaatgagattgaagccgtggcagaggggatgccgacggaagtctcggaggttccggcgtggaaggccaagtgcaagaatgtggctgcactgggtagggagatgtgcatcacggcagaacagatttcccagctccagtatgacatctgggtgcaaggcttgttgcgggatatagctcaaagccacgcagaccggctggcagcgattcaacccgcggaccttaccaactatttggagatggctacccagatggatatgcggactacgaggatactgatagggctcctcaacataatgcgcatccagaatgcggcacttatgtatgagtaccttctaacgcccacgcagctcactgcatggccgctgagaatggatactgtggccaacttgctcatcacgcacgagagtgctgcactgtcaggattagctcagttagggcccccatcggacttcacgagcaggcatgtagtgaaaggcatacctgtgagcttgcttctagacggtggggattgggaatttgagattcctgtgcaaggtggcatgtccagtttcccttccagctggtctcgcgtccgtattcggcacctggagatgcactttgtgaaggaggccagcggtattggtggtgagattatccaccagcctaccacccagactgggaccgtttacatccttctgcagggttccactatcttccatgaccgcagaagagaccaggtgttgccttttcaggccgctgctccgctcaactaccattacgcgtaccgcctcgacactggagaagccactcttacgaacgagccctcggaacagtttgccaacacattcatgcagatgacaccgttcactcactggaggctacgtctgtctgcgtccgcagcggagaataaaggattagcctttcccacagctacagctcccgactccaccactgagattgccatcactttccatgttacggccattagacaaattgactggcggcaagaggaggag

SEQ ID NO: 467 - DNA, 2559 bp, Artificial Sequence; identical to SEQ ID NO: 462
  Synthetic

SEQ ID NO: 468 - DNA, 2560 bp, Artificial Sequence
  Synthetic
atggattacagcacgctttacagggatctgaaccagataagcatgcccctggatcgggtagagttctcagaggtgatggtgatccacaggatgtacttgaggttatctgatctgaatgtgggggagctccccggagccgagagggtgaagcggttgtatgtgttggcagacgtggtggagctcgcaacatttgcgcatccacagttgcttaatacgcggatgccaggatcggtgacggtgatcattctgtgtcgtcttcttcagtttccaactgatgggtcgttcgctgcttggctcgagctgccgttcatggagttgcacacactcatagaacaatacaggtcagagataaaagcagcagatgacgcgaaatggggaacgtatgtacacgcggaggaagtacagctcagcccgctgtttaatgggtggccttatctggttgttgaggcacagcgctgtattataaccgcggccatgcacaatacatttaaccgccctgggtgggttcgctccattactcaatttacaactgatcagtccggtcgggtagataccacactgctcgcacgaacagaattcggccatattgatctaccactcgaaacagattccccaacggcattcagtgtttcacaccgccaaagtacgaatttgcccgtagagtacaccggtattccagtggaggtggtgaccgatcctaacatcttgatgggcatgcaaaccagcgtgcacattgcggagctagtgaaggcatgttacccgtcaccagaattagtgagcgctgtaggggtgcacgtgaattggctcaacgaagtcttgctccgagttgtccagaaggaatctcagttgcaagggaccgaggcctacaacgagtgccttgcgcttttaggtcgcattcaatgtgtcatgaagatggggccgtttgtctcggtagtgccgcagctgcaatacagaatgtatggtagcctcatcagacaaatggcccaggtagcacagaactacgaccaagatttcaggcagctcaagttattcattgcccaaaaccaaatccttggcagctatttgctgcagcagaacagggcctttgctgacagagaggtgcagatggagagctttcattcagcggtcatttctcaaagaaggcaggagttggacaatacattcgcaaagatggaccgattgagcgggcaaatggaggcagagagtagtgcaatggagcaagccaaaaaggaaatggacgaaggattgaggcagttccagaataggcaagttgcgaacgccctctttgccgttcttagcgctgtagctcagattgggcttgcattccttacggctggtgcaacggctcctggagctgtggcgtcggcggggcaagctgtgagcatagcaggtcaggcggcgcaaggtctgcgaagggtggtggaaattctagaggggctcgaggctgtgatggaggttgtggctgctgtgaaggacctcgtggattcattggaacaggtaggtcagattgtggacgcaccggtgatgccggaattgccctcagaggcggactggtccatttttgtgaacgaggtggaagccgtggcagaggggatgccgacggaagtctcggaggttccggcgtggaaggccaagtgcaagaatgtggctgcactgggtagggagatgtgcatcacggcagaacagatttcccagctccagtatgacatctgggtgcaaggcttgttgcgggatatagctcaaagccacgcagaccggctggcagcgattcaacctgctaatcttaccaactatttggagatggcaatacagatggatatgcggactacgaggatactgatagggctcctcaacataatgcgcatccagaatgcggcacttatgtatgagtaccttctaacgcccacgcagctcactgcatggccgctgagaatggataccgtgggtgacttgctcatcacgcaggagaatgctgcactgataggattaatgcagctagggcccccatcggacttcacgagcaggcatgtagtgaaaggcatacctgtgagcttgcttctagacggtggggattgggaatttgagattcctgtgcaaggtggcatgtccagtttcccttccagctggactcgagtgcggattcggcacctggagatgcactttgtgcaggaggcgagcggtggcggcgagattatccaccagcctgccacccagacggggaccatttacatcctcctgcagggctccactgtcttccatgaccgcagaagggaggaggtgatgacctttcaggcagcggttccgctcaactaccattacgcgtaccgcctcgacaccggcgactccactctcacaaacgaaccctctgaacagtttgccaacaagttcatgcagatgacacccttcacccgttggaggcttcgtctgtctgcgtccgcaaaagagaatgcaggattagcctttcccacggctacagcacttgactccactacccagattgtcatcactttccatgttacggccatcagacaagttgactggcggcacgacgaagagtagc

SEQ ID NO: 469 - DNA, 2556 bp, Artificial Sequence
  Synthetic
atggattacagcacgctttacagggatctgaaccagataagcatgcccctggatcgggtagagttctcagaggtgatggtaatccacaggatgtacttgaggttatctgatctgaatgtggggcagctcgagggagccgagagggtgaagcggttgtatgtgtttgcggacgtggtggagctcgcaacatttgcgcatccacagttgcttaatacgcggatgccaggatcggtgacggtgatcattctgtgtcgtcttcttcagtttccaactgatgggtcgttcgctgcttggctcgagctgccgttcatggagttgcacacactcatagaacaatacaggtcagagataaaagcagcagatgacgcgaaatggggaacgtatgtacacgcggaggaagtacagctcagcccgctgtttaatgggtggccttatctggttgttgaggcacagcgctgtattataaccgcggccatgcacaatacatttaaccgccctgggtgggttcgctccattactcaatttacaactgatcagtccggtcgggtagataccacactgctcgcacgaacagaattcggccatattgatctaccactcgaaacagattccccaacggcattcagtgtttcacaccgccaaagtacgaatttgcccgtagagtacaccggtattccagtggaggtggtgaccgatcctaacatcttgatgggcatgcaaaccagcgtgcacattgcggagctagtgaaggcatgttacccgtcaccagaattagtgagcgctgtaggggtgcacgtgaattggctcaacgaagtcttgctccgagttgtccagaaggaatctcagttgcaagggaccgaggcctacaacgagtgccttgcgcttttaggtcgcattcaatgtgtcatgaagatggggccgtttgtctcggtagtgccgcagctgcaatacagaatgtatggtagcctcatcagacaaatggcccaggtagcacagaactacgaccaagatttcaggcagctcaagttattcattgcccaaaaccaaatccttggcagctatttgctgcagcagaacaaggcctttgctgacagagaggtgcagatggagagctttcattcagcggtcatttctcaaagaagggaggagttggacaatacattcgcaaagatggaccgactgagcttgcagatggaggcagagagtagtgcaatggagcaagccaaaaaggaaatggacgaaggattgaggcagttccagaataggcaagttgcgaacgccctctttgctgttcttaaatctgtagctatgattgcgctcgcattcgtcacggctggtgcaacggctcctggagctgtggcgtcggcggggcaagctgtgagcatagcaggtcaggcggcgcaaggtctgcgaagggtggtggaaattctagagcagctggaggctgtgatggaggttgtggctgctgtgaaggacctcgtggattcattggaacaggtaggtcagattgtggacgcaccggtgatgccggaattgccctcagaggcggactggtccatttttgtgaacgaggtggaggccgtggcagagggcatgccaacggaagtctcggaggttccggtgtggagggccaagtgcaagaatgtggctgcactgggtcgggagatgagcatcacggcagtacagatttcccagctccagtatgacatctgtgtgcaaggcatgatgcgggatatggctcgaagccaggcagacaggctggccgcaattcaacccgcggaccttaccaactatttggagatggctacccagatggatatgcggactacgaggatactgatagggctcctcaacataatgcgcatccagaatgcggcacttatgtatgagtaccttctaacgcccacgcagctcactgcatggccgctgagaatggatactgtggccaacttgctcatcacgcacgagagtgctgcactgtcaggattagctcagttagggcccccatcggacttcacgagcaggcatgtagtgaaaggcatacctgtgagcttgcttctagacggtggggattgggaatttgagattcctgtgcaaggtggcatgtccagtttcccttccagctggactcgagtgcggattcggcacctggagatgcactttgtgcaggaggcgagcggtggcggcgagattatccaccagcctgccacccagacggggaccgtttacatccttctgcagggttccactgtcttccatgatcgcagaagggaggaggtgatgacctttcaggcagcagttccgctcaactaccattacgcgtaccgcctcgacaccggcgactccactctcacaaacgaaccctctgaacagtttgccaacaagttcatgcagatgacacccttcacccgttggaggcttcgtctgtctgcgtccgcaaaagagaatgcaggattagcctttcccacggctacagcacttgactccactacccagattgtcatcactttccatgttacggccatcagacaaattgactggcggcacgacgaagag

SEQ ID NO: 470 - DNA, 2559 bp, Artificial Sequence
  Synthetic
atggattacagcacgctttacagggatctgaaccagataagcatgcccctggatcgggtagagttctcagaggtgatggtaatccacaggatgtacttgaggttatctgatctgaatgtgggggagctccccggagccgagagggtgaagcggttgtatgtgttggcagacgtggtggagctcgcaacatttgcgcatccacagttgcttaatacgcggatgccaggatcggtgacggtgatcattctgtgtcgtcttcttcagtttccaactgatgggtcgttcgctgcttggctcgagctgccgttcatggagttgcacacactcatagaacaatacaggtcagagataaaagcagcagatgacgcgaaatggggaacgtatgtacacgcggaggaagtacagctcagcccgctgtttaatgggtggccttatctggttgttgaggcacagcgctgtattataaccgcggccatgcacaatacatttaaccgccctgggtgggttcgctccattactcaatttacaactgatcagtccggtcgggtagataccacactgctcgcacgaacagaattcggccatattgatctaccactcgaaacagattccccaacggcattcagtgtttcacaccgccaaagtacgaatttgcccgtagagtacaccggtattccagtggaggtggtgaccgatcctaacatcttgatgggcatgcaaaccagcgtgcacattgcggagctagtgaaggcatgttacccgtcaccagaattagtgagcgctgtaggggtgcacgtgaattggctcaacgaagtcttgctccgagttgtccagaaggaatctcagttgcaagggaccgaggcctacaacgagtgccttgcgcttttaggtcgcattcaatgtgtcatgaagatggggccgtttgtctcggtagtgccgcagctgcaatacagaatgtatggtagcctcatcagacaaatggcccaggtagcacagaactacgaccaagatttcaggcagctcaagttattcattgcccaaaaccaaatccttggcagctatttgctgcagcagaacaaggcctttgctgacagagaggtgcagatggagagctttcattcagcggtcatttctcaaagaaggcaggagttggacgacgccatcgctaagatggaccgactgagcttgcagatggaggaagaggacagagcaatggagcaagccaaaaaggaaatggacgaaggattgaagcagttccagaatgagcaagttgcaagggctgtgttcgctgttcttaaatctgtagctatgattgcgctcgcattcgtcacggctggtgcaacggctcctggggctgtggcgtcggcggggcaagctgtgagcatagcaggtcaggcggcgcaaggtctgcgaagggtggtggaaattctagaggggctcgaggctgtgatggaggttgtggctgctataaagcaccttgtggatgctctggaccaggtaagtcagattgtggatgcaccacctatgccagacatgccctcggaggcggactggtccatttttgtgaacgaggtggaggccgtggcagagggcatgccaacggaagtctcggaggttccggtgtggagggccaagtgcaagaatgtggctgcactgggtcgggagatgagcatcacggcagtacagatgtcggagctgcagtatgacatctgggtgcaaggcatgatgcgggatatggctcgaagccagacagacaggctggccgcaattcaacccgcggaccttaccaactatttggagatggctacccagatggatatgcggactacgaggatgctgctggggctcctcaacatattgcgcatccagaatgcggcgctcaggtacgagtatcttctaatgcccacggagctcacaacatggccactgggtatggataccgtgggtgacttgctcatcgcgcaggagaatgctgcactgataggattaatgcagctagggccctcatctgatttcacgagcaggcatgtggtgaaagacatacctgtgaacttgctgctcgatggcgaggattgggagtttgagattcctgtgcaagctggcatgtccagcttcccttccagctggtctcgcgtccgtattcggcacctggagatgcactttgtgaaggaggccagcggtattggtggtgagattatccaccagcctaccacccagactgggaccgtttacatccttctgcagggttccactatcttccatgaccgcagaagagaccaggtgttgccttttcaggccgctgctccgctcaactaccattacgcgtaccgcctcgacaccggcgactccactctcacaaacgaaccctctgaacagtttgccaacaagttcatgcagatgacacccttcacccgttggaggcttcgtctgtctgcgtccgcaaaagagaatgcaggattagcctttcccacggctacagcacttgactccactacccagattgtcatcactttccatgttacggccatcagacaaattgactggcggcacgacgaagag

SEQ ID NO: 471 - DNA, 2559 bp, Artificial Sequence
  Synthetic
atggattacagcacgctttacagggatctgaaccagataagcatgcccctggatcgggtagagttctcagaggtgatggtaatccacaggatgtacttgaggttatctgatctgaatgtgggggagctccccggagccgagagggtgaagcggttgtatgtgttggcagacgtggtggagctcgcaacatttgcgcatccacagttgcttaatacgcggatgccaggatcggtgacggtgatcattctgtgtcgtcttcttcagtttccaactgatgggtcgttcgctgcttggctcgagctgccgttcatggagttgcacacactcatagaacaatacaggtcagagataaaagcagcagatgacgcgaaatggggaacgtatgtacacgcggaggaagtacagctcagcccgctgtttaatgggtggccttatctggttgttgaggcacagcgctgtattataaccgcggccatgcacaatacatttaaccgccctgggtgggttcgctccattactcaatttacaactgatcagtccggtcgggtagataccacactgctcgcacgaacagaattcggccatattgatctaccactcgaaacagattccccaacggcattcagtgtttcacaccgccaaagtacgaatttgcccgtagagtacaccggtattccagtggaggtggtgaccgatcctaacatcttgatgggcatgcaaaccagcgtgcacattgcggagctagtgaaggcatgttacccgtcaccagaattagtgagcgctgtaggggtgcacgtgaattggctcaacgaagtcttgctccgagttgtccagaaggaatctcagttgcaagggaccgaggcctacaacgagtgccttgcgcttttaggtcgcattcaatgtgtcatgaagatggggccgtttgtctcggtagtgccgcagctgcaatacagaatgtatggtagcctcatcagacaaatggcccaggtagcacagaactacgaccaagaattcaagcaattcaaattattcatcatccaaaatcaaatccttggcagctatttgctgcagcagaacagggcatttgctgagagggagctacagatggagagctttcatgctgctgtcatttctcaaagaagggaggagttggacaatacattcgcaaagatggaccgattgagcgggcaaatggaggcagagagtagtgcaatggagcaagccaaaaaggaaatggacgaaggattgaggcagttccagaataggcaagttgcgaacgccctctttgccgttcttagcgctgtagctcagattgggctcgcattcgtcacggctggtgcaacggctcctggagctgtggcgtcggcggggcaagctgtgagcatagcaggtcaggcggcgcaaggtctgcgaagggtggtggaaattctagagcagctggaggctgtgatggaggttgtggctgctataaagcaccttgtggatgctctggaccaggtaagtcagattgtggatgcaccacctatgccagacatgccctcggaggcggactggagtatttttgtgaatgagattgaagccgtggcagagggcatgccaacggaagtctcggaggttccggtgtggaaggccaagtgcaagaatgtggctgcactgggtagggagatgtgcatcacggcagtacagatgtcggagctgcagtatgacatctgggtgcaaggcttgttgcgggatatagctcaaagccacgcagaccggctggcagcgattcaacctgctaatcttaccaactatttggagatggcaatacagatggatatgcggactacgaggatactgatagggctcctcaacataatgcgcatccagaatgcggcacttatgtatgagtaccttctaacgcccacgcagctcactgcatggccgctgagaatggatactgtggccaacttgctcatcacgcacgagagtgctgcactgtcaggattagctcagttagggccctcatctgatttcacgagcaggcatgtggtgaaagacatacctgtgaacttgctgctcgatggcgaggattgggagtttgagattcctgtgcaagctggcatgtccagcttcccttccagctggtctcgcgtccgtattcggcacctggagatgcactttgtgaaggaggccagcggtattggtggtgagattatccaccagcctaccacccagactgggaccgtttacatccttctgcagggttccactatcttccatgaccgcagaagagaccaggtgttgccttttcaggccgctgctccgctcaactaccattacgcgtaccgcctcgacactggagaagccactcttacgaacgagccctcggaacagtttgccaacacattcatgcagatgacaccgttcactcactggaggctacgtctgtctgcgtccgcagcggagaataaaggattagcctttcccacggctacagcacttgactccactacccagattgtcatcactttccatgttacggccatcagacaaattgactggcggcaagaggaggag

SEQ ID NO: 472 - DNA, 2556 bp, Artificial Sequence
  Synthetic
atggattacagcacgctttacagggatctgaaccagataagcatgcccctggatcgggtagagttctcagaggtgatggtaatccacaggatgtacttgaggttatctgatctgaatgtggggcagctcgagggagccgagaaagtgaagcggttgtatgtgttggcagacgtggtggagctcgcaacatttgcgcatccacagttgcttaatacgcggatgccaggatcggtgacggtgatcattctgtgtcgtcttcttcagtttccaactgatgggtcgttcgctgcttggctcgagctgccgttcatggagttgcacacactcatagaacaatacaggtcagagataaaagcagcagatgacgcgaaatggggaacgtatgtacacgcggaggaagtacagctcagcccgctgtttaatgggtggccttatctggttgttgaggcacagcgctgtattataaccgcggccatgcacaatacatttaaccgccctgggtgggttcgctccattactcaatttacaactgatcagtccggtcgggtagataccacactgctcgcacgaacagaattcggccatattgatctaccactcgaaacagattccccaacggcattcagtgtttcacaccgccaaagtacgaatttgcccgtagagtacaccggtattccagtggaggtggtgaccgatcctaacatcttgatgggcatgcaaaccagcgtacacattgcggagctagtgaaggcatgttacccgtcaccagaattagtgagcgctgtaggggtgcacgtgaattggctcaacgaagtcttgctccgagttgtccagaaggaatctcagttgcaagggaccgaggcctacaacgagtgccttgcgcttttaggtcgcattcaatgtgtcatgaagatggggccgtttgtctcggtagtgccgcagctgcaatacagaatgtatggtagcctcatcagacaaatggcccaggtagcacagaactacgaccaagatttcaggcagctcaagttattcattgcccaaaaccaaatccttggcagctatttgctgcagcagaacaaggcctttgctgacagagaggtgcagatggagagctttcattcagcggtcatttctcaaagaagggaggagttggacgacgccatcgctaagatggaccgactgagcttgcagatggaggaagaggacagagcaatggagcaagcccgaaaagaaatggaagaaggattgaagcagttccagaatgagcaagttgcaagggctgtgttcgctgttcttaaatctgtagctatgattgcgctcgcattcgtcacggctggtgcaacggctcctggggctgcagcatctgcagcgcaagctgtgaacatagccggtcaagcggcacaagctctgcgaagggtggtggaaattctagagcagctggaggctgtgatggaggttgtggctgctgtgaaggacctcgtggattcattggaacaggtaggtcagattgtggacgcaccggtgatgccggaattgccctcagaggcggactggtccatttttgtgaacgaggtggaggccgtggcagaggggatgccgacggaagtctcggaggttccggcgtggaaggccaagtgcaagaatgtggctgcactgggtcgggagatgagcatcacggcagaacagatttcccagctccagtatgacatctgggtgcaaggcttgttgcgggatatggctcgaagccaggcagacaggctggccgcaattcaacccgcggaccttaccaactatttggagatggctacccagatggatatgcggactacgaggatgctgctggggctcctcaacatattgcgcatccagaatgcggcgctcaggtacgagtatcttctaatgcccacggagctcacaacatggccactgggtatggataccgtgggtgacttgctcatcgcgcaggagaatgctgcactgataggattaatgcagctagggccctcatctgatttcacgagcaggcatgtggtgaaagacatacctgtgagcttgcttctagacggtggggattgggaatttgagattcctgtgcaaggtggcatgtccagtttcccttccagctggactcgagtgcggattcggcacctggagatgcactttgtgcaggaggcgagcggtggcggcgagattatccaccagcctgccacccagacggggaccatttacatcctcctgcagggctccactgtcttccatgatcgcagaagggaggaggtgatgacctttcaggcagcggttccgctcaactaccattacgcgtaccgcctcgacactggagaagccactcttacgaacgagccctcggaacagtttgccaacaagttcatgcagatgacacccttcacccgttggaggcttcgtctgtctgcgtccgcagcggagaataaaggattagcctttcccacagctacagctcccgactccaccactgagattgccatcactttccatgttacggccattagacaaattgactggcggcaagaggaggag

SEQ ID NO: 473 - DNA, 2605 bp, Artificial Sequence
  Synthetic
atggctctcgtggattacggcaagcttttcgaggatctgaaccagataagcatgggtgtactggatcgggtagagttttcagaggtgatggtgatccacaggatgtatgtgaggctagctgatctgaatgtggggcagctcgagggagccgagaaagtgaagcggttgtatgtgtttgcggacgtggtggagctaccagtcgtggaatggcggtggccgccgcaaataccaggatcggtgacggtgatcatattgtgtcgtcttcttcaatggccaactgatgggaggcagtcggacaccgagctccacctgacattcatgaagttgcatgccatacaacgagaggaaaatcggtgggagataaccgcagcagatggcatgaactggggagtttacatacacgcagaggaagtacaggttggcgtgctgacaatgtcatggtcttcggtacttagagtttcggcacttcgctctgttataacctccggctttcgcgccgttagtgtgtttgaggtaccgggaagtgtaaggtccacccttggagctactttaaggcccgatcacgccttatatagtacaactatgcaagccacacccaacgcatcgcatattagtgcttttaaccttcgcatagtttccccgtcggcatatcgtgtttgtcctctccaaaatgacacagatacctacttaggtattccagcagacgtggcggcagttcttccagtagacgtggtgactgatcctaacatcttgctgggcatgcagacaacggtacacattgcggagctagtcaaggcatgtcatccgtcacccgatgttgtgagcgctgtaggggagcacctgaactggctcaacaaactcttactcccacttaaggaatcgactcagttgcaaggaagcgagtcgtacaaggagtgccttgcactcttgggtcgtgttcacgctgcgatgaagatggtgagaattggcttagtagtgccccagctgcaatacagaatgtacggtagcctcatcaaccaaatggcccaagtagcacaaaactacgaccgagaattcaagcaattcaaattattcatcatccaaaatcaaatccttggcagctatttgctgcagcagaacagggcatttgctgagagggagctgcagatggagagctttcatgctgctgtcatttctcaaagaaggcaggagttggacgacgccatcgctaagatggaccgactgagcgggcaaatggaggcagagagtagtgcaatggagcaagccaaaaaggaaatggacgaaggattgaggcagttccagaataggcaagttgcgaacgccctctttgccgttcttagcgctgtagctcagattgggcttgcattccttacggctggtgcaacggctcctggagctgtggcgtcggcggggcaagctgtgagcatagcaggtcaggcggcgcaaggtctgcgaagggtggtggaaattctagaggggctcgaggctgtgatggaggttgtggctgctgtgaaggacctcgtggattcattggaacaggtaggtcagattgtggacgcaccggtgatgccggaattgccctcagaggcggactggtccatttttgtgaacgaggtggaggccgtggcagagggcatgccaacggaagtctcggaggttccggtgtggagggccaagtgcaagaatgtggctgcactgggtcgggagatgagcatcacggcagtacagatttcccagctccagtatgacatctgggtgcaaggcatgatgcgggatatggctcgaagtcaggcagacaggctggccgcaattcaacccgcggaccttaccaactatttggagatggctacccagatggatatgcggactacgaggatgctgctggggctcctcaacatattgcgcatccagaatgcggcgctcaggtacgagtatcttctaatgcccacggagctcacaacatggccactgggtatggataccgtgggtgacttgctcatcgcgcaggagaatgctgcactgataggattaatgcagctagggccctcatctgatttcacgagcaggcatgtagtgaaaggcatacctgtgagcttgcttctagacggtggggattgggagtttgagattcctgtgcaagctggcatgtccagcttcccttccagctggtctcgcgtccggattcggcacctggagatgcactttgtgcaggaggccagcggtattggtggtgagattatccaccagcctgccacccagacggggaccgtttacatccttctgcagggttccactatcttccatgaccgcagaagagaccaggtgttgccttttcaggccgctgctccgctcaactaccattacgcgtaccgcctcgacaccggcgactccactctcacaaacgaaccctctgaacagtttgccaacaagttcatgcagatgacacccttcacccgttggaggcttcgtctgtctgcgtccgcaaaagagaatgcaggattagcctttcccacggctacagcacttgactccactacccagattgtcatcactttccatgttacggccattagacaaattgactggcggcacgatgaagagtagc

SEQ ID NO: 474 - DNA, 2605 bp, Artificial Sequence
  Synthetic
atggctctcgtggattacggcaagcttttcgaggatctgaaccagataagcatgggtgtactggatcgggtagagttttcagaggtgatggtgatccacaggatgtatgtgaggctagctgatctgaatgtggggcagctcgagggagccgagaaagtgaagcggttgtatgtgtttgcggacgtggtggagctaccagtcgtggaatggcggtggccgccgcaaataccaggatcggtgacggtgatcatattgtgtcgtcttcttcaatggccaactgatgggaggcagtcggacaccgagctccacctgacattcatgaagttgcatgccatacaacgagaggaaaatcggtgggagataaccgcagcagatggcatgaactggggagtttacatacacgcagaggaagtacaggttggcgtgctgacaatgtcatggtcttcggtacttagagtttcggcacttcgctctgttataacctccggctttcgcgccgttagtgtgtttgaggtaccgggaagtgtaaggtccacccttggagctactttaaggcccgatcacgccttatatagtacaactatgcaagccacacccaacgcatcgcatattagtgcttttaaccttcgcatagtttccccgtcggcatatcgtgtttgtcctctccaaaatgacacagatacctacttaggtattccagcagacgtggcggcagttcttccagtagacgtggtgactgatcctaacatcttgctgggcatgcagacaacggtacacattgcggagctagtcaaggcatgtcatccgtcacccgatgttgtgagcgctgtaggggagcacctgaactggctcaacaaactcttactcccacttaaggaatcgactcagttgcaaggaagcgagtcgtacaaggagtgccttgcactcttgggtcgtgttcacgctgcgatgaagatggtgagaattggcttagtagtgccccagctgcaatacagaatgtacggtagcctcatcaaccaaatggcccaagtagcacaaaactacgaccgagaattcaagcaattcaaattattcatcatccaaaatcaaatccttggcagctatttgctgcagcagaacagggcatttgctgagagggagctgcagatggagagctttcatgctgctgtcatttctcaaagaagggaggagttggacaatacattcgcaaagatggaccgactgagcttgcagatggaggaagaggacagagcaatggagcaagccaaaaaggaaatggacgaaggattgaggcagttccagaataggcaagttgcgaacgccctctttgccgttcttagcgctgtagctcagattgggcttgcattccttacggctggtgcaacggctcctggagctgtggcgtcggcggggcaagctgtgagcatagcaggtcaggcggcgcaaggtctgcgaagggtggtggaaattctagaggggctcgaggctgtgatggaggttgtggctgctataaagcaccttgtggattcattggaacaggtaggtcagattgtggacgcaccggtgatgccggaattgccctcagaggcggactggtccatttttgtgaacgaggtggaggccgtggcagagggcatgccaacggaagtctcggaggttccggtgtggaaggccaagtgcaagaatgtggctgcactgggtagggagatgagcatcacggcagtacagatgtcggagctgcagtatgacatctgggtgcaaggcatgatgcgggatatggctcgaagccaggcagacaggctggccgcaattcaacccgcggaccttaccaactatttggagatggctacccagatggatatgcggactacgaggatgctgctggggctcctcaacatattgcgcatccagaatgcggcgctcaggtacgagtatcttctaatgcccacggagctcacaacatggccactgggtatggataccgtgggtgacttgctcatcgcgcaggagaatgctgcactgataggattaatgcagctagggccctcatctgatttcacgagcaggcatgtggtgaaagacatacctgtgaacttgctgctcgatggcgaggattgggagtttgagattcctgtgcaaggtggcatgtccagtttcccttccagctggactcgagtgcggattcggcacctggagatgcactttgtgaaggaggccagcggtattggtggtgagattatccaccagcctgccacccagaccgggaccgtttacatccttctgcagggttccactatcttccatgatcgcagaagggaggaggtgttgccttttcaggccgctgctccgctcaactaccattacgcgtaccgcctcgacactggagaagccactcttacgaacgagccctcggaacagtttgccaacacattcatgcagatgacacccttcacccgttggaggctacgtctgtctgcgtccgcagcggagaataaaggattagcctttcccacagctacagctcccgactccaccactgagattgccatcactttccatgttacggccatcagacaaattgactggcggcaagaggaggagtagc

SEQ ID NO: 475 - DNA, 2602 bp, Artificial Sequence
  Synthetic
atggctctcgtggattacggcaagcttttcgaggatctgaaccagataagcatgggtgtactggatcgggtagagttttcagaggtgatggtgatccacaggatgtatgtgaggctagctgatctgaatgtggggcagctcgagggagccgagaaagtgaagcggttgtatgtgtttgcggacgtggtggagctaccagtcgtggaatggcggtggccgccgcaaataccaggatcggtgacggtgatcatattgtgtcgtcttcttcaatggccaactgatgggaggcagtcggacaccgagctccacctgacattcatgaagttgcatgccatacaacgagaggaaaatcggtgggagataaccgcagcagatggcatgaactggggagtttacatacacgcagaggaagtacaggttggcgtgctgacaatgtcatggtcttcggtacttagagtttcggcacttcgctctgttataacctccggctttcgcgccgttagtgtgtttgaggtaccgggaagtgtaaggtccacccttggagctactttaaggcccgatcacgccttatatagtacaactatgcaagccacacccaacgcatcgcatattagtgcttttaaccttcgcatagtttccccgtcggcatatcgtgtttgtcctctccaaaatgacacagatacctacttaggtattccagcagacgtggcggcagttcttccagtagacgtggtgactgatcctaacatcttgctgggcatgcagacaacggtacacattgcggagctagtcaaggcatgtcatccgtcacccgatgttgtgagcgctgtaggggagcacctgaactggctcaacaaactcttactcccacttaaggaatcgactcagttgcaaggaagcgagtcgtacaaggagtgccttgcactcttgggtcgtgttcacgctgcgatgaagatggtgagaattggcttagtagtgccccagctgcaatacagaatgtacggtagcctcatcaaccaaatggcccaagtagcacaaaactacgaccgagaattcaagcaattcaaattattcatcatccaaaatcaaatccttggcagctatttgctgcagcagaacagggcatttgctgagagggagctgcagatggagagctttcattcagcggtcatttctcaaagaagggaggagttggacaatacattcgcaaagatggaccgactgagcttgcagatggaggaagaggacagagcaatggagcaagccaaaaaggaaatggacgaaggattgaggcagttccagaataggcaagttgcgaacgccctctttgccgttcttagcgctgtagctcagattgggcttgcattccttacggctggtgcaacggctcctggggctgtggcgtcggcggggcaagctgtgagcatagcaggtcaggcggcgcaaggtctgcgaagggtggtggaaattctagagcagctggaggctgtgatggaggttgtggctgctgtgaaggacctcgtggattcattggaacaggtaggtcagattgtggacgcaccggtgatgccggaattgccctcagaggcggactggtccatttttgtgaacgaggtggaggccgtggcagaggggatgccgacggaagtctcggaggttccggcgtggaaggccaagtgcaagaatgtggctgcactgggtagggagatgtgcatcacggcagaacagatttcccagctccagtatgacatctgggtgcaaggcatgatgcgggatatggctcgaagccaggcagacaggctggccgcaattcaacccgcggaccttaccaactatttggagatggctacccagatggatatgcggactacgaggatgctgctggggctcctcaacatattgcgcatccagaatgcggcgctcaggtacgagtatcttctaatgcccacggagctcacaacatggccactgggtatggataccgtgggtgacttgctcatcgcgcacgagagtgctgcactgtcaggattagctcagttagggcccccatcggacttcacgagcaggcatgtagtgaaaggcatacctgtgagcttgcttctagacggtggggattgggaatttgagattcctgtgcaaggtggcatgtccagtttcccttccagctggactcgagtgcggattcggcacctggagatgcactttgtgcaggaggcgagcggtggcggcgagattatccaccagcctgccacccagacggggaccatttacatcctcctgcagggctccactgtcttccatgatcgcagaagggaggaggtgatgacctttcaggcagcggttccgctcaactaccattacgcgtaccgcctcgacactggagaagccactcttacgaacgagccctcggaacagtttgccaacacattcatgcagatgacaccgttcactcactggaggcttcgtctgtctgcgtccgcagcggagaataaaggattagcctttcccacagctacagctcccgactccaccactgagattgccatcactttccatgttacggccattagacaaattgactggcggcacgacgaagagtagc

SEQ ID NO: 476 - DNA, 2605 bp, Artificial Sequence
  Synthetic
atggctctcgtggattacggcaagcttttcgaggatctgaaccagataagcatgggtgtactggatcgggtagagttttcagaggtgatggtgatccacaggatgtatgtgaggctagctgatctgaatgtggggcagctcgagggagccgagaaagtgaagcggttgtatgtgtttgcggacgtggtggagctaccagtcgtggaatggcggtggccgccgcaaataccaggatcggtgacggtgatcatattgtgtcgtcttcttcaatggccaactgatgggaggcagtcggacaccgagctccacctgacattcatgaagttgcatgccatacaacgagaggaaaatcggtgggagataaccgcagcagatggcatgaactggggagtttacatacacgcagaggaagtacaggttggcgtgctgacaatgtcatggtcttcggtacttagagtttcggcacttcgctctgttataacctccggctttcgcgccgttagtgtgtttgaggtaccgggaagtgtaaggtccacccttggagctactttaaggcccgatcacgccttatatagtacaactatgcaagccacacccaacgcatcgcatattagtgcttttaaccttcgcatagtttccccgtcggcatatcgtgtttgtcctctccaaaatgacacagatacctacttaggtattccagcagacgtggcggcagttcttccagtagacgtggtgactgatcctaacatcttgctgggcatgcagacaacggtacacattgcggagctagtcaaggcatgtcatccgtcacccgatgttgtgagcgctgtaggggagcacctgaactggctcaacaaactcttactcccacttaaggaatcgactcagttgcaaggaagcgagtcgtacaaggagtgccttgcactcttgggtcgtgttcacgctgcgatgaagatggtgagaattggcttagtagtgccccagctgcaatacagaatgtacggtagcctcatcaaccaaatggcccaagtagcacaaaactacgaccgagaattcaagcaattcaaattattcatcatccaaaatcaaatccttggcagctatttgctgcagcagaacagggcatttgctgagagggagctgcagatggagagctttcattcagcggtcatttctcaaagaaggcaggagttggacgacgccatcgctaagatggaccgattgagcgggcaaatggaggcagagagtagtgcaatggagcaagccaaaaaggaaatggacgaaggattgaggcagttccagaataggcaagttgcgaacgccctctttgccgttcttagcgctgtagctatgattgcgctcgcattcgtcacggctggtgcaacggctcctggggctgtggcgtcggcggggcaagctgtgagcatagcaggtcaggcggcgcaaggtctgcgaagggtggtggaaattctagaggggctcgaggctgtgatggaggttgtggctgctgtgaaggacctcgtggattcattggaacaggtaggtcagattgtggacgcaccggtgatgccggaattgccctcagaggcggactggtccatttttgtgaacgaggtggaggccgtggcagaggggatgccgacggaagtctcggaggttccggtgtggaaggccaagtgcaagaatgtggctgcactgggtcgggagatgagcatcacggcagtacagatgtcggagctgcagtatgacatctgggtgcaaggcatgatgcgggatatggctcgaagccacgcagaccggctggcagcgattcaacctgctaatcttaccaactatttggagatggcaatacagatggatatgcggactacgaggatgctgctggggctcctcaacatattgcgcatccagaatgcggcgctcaggtacgagtatcttctaacgcccacggagctcacaacatggccactgggtatggataccgtgggtgacttgctcatcgcgcaggagaatgctgcactgataggattaatgcagctagggcccccatcggacttcacgagcaggcatgtagtgaaaggcatacctgtgagcttgcttctagacggtggggattgggaatttgagattcctgtgcaaggtggcatgtccagtttcccttccagctggtctcgcgtccgtattcggcacctggagatgcactttgtgaaggaggccagcggtattggtggtgagattatccaccagcctaccacccagactgggaccgtttacatccttctgcagggctccactgtcttccatgatcgcagaagggaggaggtgatgacctttcaggcagcggttccgctcaactaccattacgcgtaccgcctcgacaccggcgactccactctcacaaacgaaccctctgaacagtttgccaacaagttcatgcagatgacaccgttcacccgttggaggcttcgtctgtctgcgtccgcaaaagagaatgcaggattagcctttcccacagctacagctcccgactccaccactgagattgtcatcactttccatgttacggccatcagacaaattgactggcggcacgacgaagagtagc

SEQ ID NO: 477 - DNA, 2598 bp, Artificial Sequence
  Synthetic
atggctctcgtggattacggcaagcttttcgaggatctgaaccagataagcatgggtgtactggatcgggtagagttttcagaggtgatggtgatccacaggatgtatgtgaggctagctgatctgaatgtggggcagctcgagggagccgagaaagtgaagcggttgtatgtgtttgcggacgtggtggagctaccagtcgtggaatggcggtggccgccgcaaataccaggatcggtgacggtgatcatattgtgtcgtcttcttcaatggccaactgatgggaggcagtcggacaccgagctccacctgacattcatgaagttgcatgccatacaacgagaggaaaatcggtgggagataaccgcagcagatggcatgaactggggagtttacatacacgcagaggaagtacaggttggcgtgctgacaatgtcatggtcttcggtacttagagtttcggcacttcgctctgttataacctccggctttcgcgccgttagtgtgtttgaggtaccgggaagtgtaaggtccacccttggagctactttaaggcccgatcacgccttatatagtacaactatgcaagccacacccaacgcatcgcatattagtgcttttaaccttcgcatagtttccccgtcggcatatcgtgtttgtcctctccaaaatgacacagatacctacttaggtattccagcagacgtggcggcagttcttccagtagacgtggtgactgatcctaacatcttgctgggcatgcagacaacggtacacattgcggagctagtcaaggcatgtcatccgtcacccgatgttgtgagcgctgtaggggagcacctgaactggctcaacaaactcttactcccacttaaggaatcgactcagttgcaaggaagcgagtcgtacaaggagtgccttgcactcttgggtcgtgttcacgctgcgatgaagatggtgagaattggcttagtagtgccccagctgcaatacagaatgtacggtagcctcatcaaccaaatggcccaagtagcacaaaactacgaccgagaattcaagcaattcaaattattcatcatccaaaatcaaatccttggcagctatttgctgcagcagaacagggcatttgctgagagggagctgcagatggagagctttcatgctgctgtcatttctcaaagaaggcaggagttggacgacgccatcgctaagatggaccgactgagcttgcagatggaggcagaggacagagcaatggagcaagccaaaaaggaaatggacgaaggattgaagcagttccagaataggcaagttgcgaacgccctctttgccgttcttagcgctgtagctcagattgggctcgcattcgtcacggctggtgcaacggctcctggagctgtggcgtcggcggggcaagctgtgagcatagcaggtcaggcggcgcaaggtctgcgaagggtggtggagattctagagcagctggaggctgtgatggaggttgtggctgctgtgaaggacctcgtggattcattggaacaggtaggtcagattgtggacgcaccggtgatgccggaattgccctcagaggcggactggtccatttttgtgaacgaggtggaggccgtggcagagggcatgccgacggaagtctcggaggttccggtgtggagggccaagtgcaagaatgtggctgcactgggtcgggagatgagcatcacggcagtacagatgtcggagctgcagtatgacatctgggtgcaaggcttgttgcgggatatagctcaaagccacgcagaccggctggcagcgattcaacccgcggaccttaccaactatttggagatggctacccagatggatatgcggactacgaggatgctgctggggctcctcaacatattgcgcatccagaatgcggcgctcaggtacgagtatcttctaatgcccacggagctcacaacatggccactgggtatggataccgtgggtgacttgctcatcgcgcaggagaatgctgcactgataggattaatgcagctagggccctcatctgatttcacgagcaggcatgtggtgaaagacatacctgtgaacttgctgctcgatggcgaggattgggaatttgagattcctgtgcaaggtggcatgtccagcttcccttccagctggtctcgcgtccgtattcggcacctggagatgcactttgtgcaggaggcgagcggtggcggcgagattatccaccagcctgccacccagacggggaccattcacatcctcctgcagggctccactgtcttccatgaccgcagaagagaccaggtgttgccttttcaggccgctgctccgctcaactaccattacgcgtaccgcctcgacactggagaagccactcttacgaacgaaccctctgaacagtttgccaacaagttcatgcagatgacacccttcacccgttggaggcttcgtctgtctgcgtccgcaaaagagaatgcaggattagcctttcccacagctacagctcccgactccaccactgagattgccatcactttccatgttacggccattagacaaattgactggcggcaagaggaggag

SEQ ID NO: 478 - DNA, 2598 bp, Artificial Sequence
  Synthetic
atggctctcgtggattacggcaagcttttcgaggatctgaaccagataagcatgggtgtactggatcgggtagagttttcagaggtgatggtgatccacaggatgtatgtgaggctagctgatctgaatgtggggcagctcgagggagccgagaaagtgaagcggttgtatgtgtttgcggacgtggtggagctaccagtcgtggaatggcggtggccgccgcaaataccaggatcggtgacggtgatcatattgtgtcgtcttcttcaatggccaactgatgggaggcagtcggacaccgagctccacctgacattcatgaagttgcatgccatacaacgagaggaaaatcggtgggagataaccgcagcagatggcatgaactggggagtttacatacacgcagaggaagtacaggttggcgtgctgacaatgtcatggtcttcggtacttagagtttcggcacttcgctctgttataacctccggctttcgcgccgttagtgtgtttgaggtaccgggaagtgtaaggtccacccttggagctactttaaggcccgatcacgccttatatagtacaactatgcaagccacacccaacgcatcgcatattagtgcttttaaccttcgcatagtttccccgtcggcatatcgtgtttgtcctctccaaaatgacacagatacctacttaggtattccagcagacgtggcggcagttcttccagtagacgtggtgactgatcctaacatcttgctgggcatgcagacaacggtacacattgcggagctagtcaaggcatgtcatccgtcacccgatgttgtgagcgctgtaggggagcacctgaactggctcaacaaactcttactcccacttaaggaatcgactcagttgcaaggaagcgagtcgtacaaggagtgccttgcactcttgggtcgtgttcacgctgcgatgaagatggtgagaattggcttagtagtgccccagctgcaatacagaatgtacggtagcctcatcaaccaaatggcccaagtagcacaaaactacgaccgagaattcaagcaattcaaattattcatcatccaaaatcaaatccttggcagctatttgctgcagcagaacagggcatttgctgacagagaggtgcagatggagagctttcatgctgctgtcatttctcaaagaagggaggagttggacaatacattcgcaaagatggaccgattgagcgggcaaatggaggcagagagtagtgcaatggagcaagccaaaaaggaaatggacgaaggattgaggcagttccagaataggcaagttgcgaacgccctctttgccgttcttagcgctgtagctcagattgggcttgcattccttacggctggtgcaacggctcctggagctgtggcgtcggcggggcaagctgtgagcatagcaggtcaggcggcgcaaggtctgcgaagggtggtggaaattctagagcagctggaggctgtgatggaggttgtggctgctgtgaaggacctcgtggattcattggaacaggtaagtcagattgtggatgcaccacctatgccagacatgccctcagaggcggactggtccatttttgtgaacgaggtggaggccgtggcagagggcatgccaacggaagtctcggaggttccggtgtggagggccaagtgcaagaatgtggctgcactgggtcgggagatgagcatcacggcagaacagatttcccagctccagtatgacatctgggtgcaaggcatgatgcgggatatggctcgaagccaggcagacaggctggccgcaattcaacccgcggaccttaccaactatttggagatggctacccagatggatatgcggactacgaggatgctgctggggctcctcaacatattgcgcatccagaatgcggcacttatgtatgagtaccttctaacgcccacgcagctcactgcatggccgctgagaatggatactgtggccaacttgctcatcacgcacgagagtgctgcactgtcaggattagctcagttagggcccccatcggacttcacgagcaggcatgtagtgaaagacatacctgtgaacttgctgctcgatggcgaggattgggagtttgagattcctgtgcaagctggcatgtccagcttcccttccagctggactcgagtgcggattcggcacctggagatgcactttgtgcaggaggcgagcggtggcggcgagattatccaccagcctaccacccagactgggaccgtttacatccttctgcagggttccactatcttccatgatcgcagaagggaggaggtgatgacctttcaggcagcggttccgctcaactaccattacgcgtaccgcctcgacactggagaagccactcttacgaacgagccctcggaacagtttgccaacacattcatgcagatgacaccgttcactcactggaggctacgtctgtctgcgtccgcagcggagaataaaggattagcctttcccacagctacagctcccgactccaccactgagattgccatcactttccatgttacggccattagacaaattgactggcggcaagaggaggag

SEQ ID NO: 479 - DNA, 2602 bp, Artificial Sequence
  Synthetic
atggctctcgtggattacggcaagcttttcgaggatctgaaccagataagcatgggtgtactggatcgggtagagttttcagaggtgatggtgatccacaggatgtatgtgaggctagctgatctgaatgtggggcagctcgagggagccgagaaagtgaagcggttgtatgtgtttgcggacgtggtggagctaccagtcgtggaatggcggtggccgccgcaaataccaggatcggtgacggtgatcatattgtgtcgtcttcttcaatggccaactgatgggaggcagtcggacaccgagctccacctgacattcatgaagttgcatgccatacaacgagaggaaaatcggtgggagataaccgcagcagatggcatgaactggggagtttacatacacgcagaggaagtacaggttggcgtgctgacaatgtcatggtcttcggtacttagagtttcggcacttcgctctgttataacctccggctttcgcgccgttagtgtgtttgaggtaccgggaagtgtaaggtccacccttggagctactttaaggcccgatcacgccttatatagtacaactatgcaagccacacccaacgcatcgcatattagtgcttttaaccttcgcatagtttccccgtcggcatatcgtgtttgtcctctccaaaatgacacagatacctacttaggtattccagcagacgtggcggcagttcttccagtagacgtggtgactgatcctaacatcttgctgggcatgcagacaacggtacacattgcggagctagtcaaggcatgtcatccgtcacccgatgttgtgagcgctgtaggggagcacctgaactggctcaacaaactcttactcccacttaaggaatcgactcagttgcaaggaagcgagtcgtacaaggagtgccttgcactcttgggtcgtgttcacgctgcgatgaagatggtgagaattggcttagtagtgccccagctgcaatacagaatgtacggtagcctcatcaaccaaatggcccaagtagcacaaaactacgaccgagaattcaagcaattcaaattattcatcatccaaaatcaaatccttggcagctatttgctgcagcagaacaaggcctttgctgacagagaggtgcagatggagagctttcattcagcggtcatttctcaaagaaggcaggagttggacgacgccatcgctaagatggaccgactgagcgggcaaatggaggcagagagtagtgcaatggagcaagccaaaaaggaaatggacgaaggattgaggcagttccagaataggcaagttgcgaacgccctctttgccgttcttagcgctgtagctcagattgggcttgcattcgtcacggctggtgcaacggctcctggagctgtggcgtcggcggggcaagctgtgagcatagcaggtcaggcggcgcaaggtctgcgaagggtggtggaaattctagaggggctcgaggctgtgatggaggttgtggctgctgtgaaggacctcgtggattcattggaacaggtaggtcagattgtggacgcaccggtgatgccggaattgccctcagaggcggactggtccatttttgtgaacgaggtggaggccgtggcagagggcatgccaacggaagtctcggaggttccggtgtggagggccaagtgcaagaatgtggctgcactgggtagggagatgtgcatcacggcagtacagatgtcggagctgcagtatgacatctgggtgcaaggcttgttgcgggatatggctcgaagccaggcagacaggctggccgcaattcaacccgcggaccttaccaactatttggagatggctacccagatggatatgcggactacgaggatgctgctggggctcctcaacatattgcgcatccagaatgcggcgctcaggtacgagtatcttctaatgcccacggagctcacaacatggccactgggtatggataccgtgggtgacttgctcatcgcgcaggagaatgctgcactgataggattaatgcagctagggccctcatctgatttcacgagcaggcatgtagtgaaaggcatacctgtgagcttgcttctagacggtggggattgggaatttgagattcctgtgcaagctggcatgtccagtttcccttccagctggactcgagtgcggattcggcacctggagatgcactttgtgaaggaggcgagcggtggcggcgagattatccaccagcctgccacccagacggggaccatttacatccttctgcagggttccactatcttccatgaccgcagaagagaccaggtgttgccttttcaggccgctgctccgctcaactaccattacgcgtaccgcctcgacactggagaagccactcttacgaacgagccctctgaacagtttgccaacacattcatgcagatgacacccttcacccgttggaggcttcgtctgtctgcgtccgcagcggagaataaaggattagcctttcccacagctacagctcccgactccaccactgagattgccatcactttccatgttacggccatcagacaaattgactggcggcacgacgaagagtagc

SEQ ID NO: 480 - DNA, 2605 bp, Artificial Sequence
  Synthetic
atggctctcgtggattacggcaagcttttcgaggatctgaaccagataagcatgggtgtactggatcgggtagagttttcagaggtgatggtgatccacaggatgtatgtgaggctagctgatctgaatgtggggcagctcgagggagccgagaaagtgaagcggttgtatgtgtttgcggacgtggtggagctaccagtcgtggaatggcggtggccgccgcaaataccaggatcggtgacggtgatcatattgtgtcgtcttcttcaatggccaactgatgggaggcagtcggacaccgagctccacctgacattcatgaagttgcatgccatacaacgagaggaaaatcggtgggagataaccgcagcagatggcatgaactggggagtttacatacacgcagaggaagtacaggttggcgtgctgacaatgtcatggtcttcggtacttagagtttcggcacttcgctctgttataacctccggctttcgcgccgttagtgtgtttgaggtaccgggaagtgtaaggtccacccttggagctactttaaggcccgatcacgccttatatagtacaactatgcaagccacacccaacgcatcgcatattagtgcttttaaccttcgcatagtttccccgtcggcatatcgtgtttgtcctctccaaaatgacacagatacctacttaggtattccagcagacgtggcggcagttcttccagtagacgtggtgactgatcctaacatcttgctgggcatgcagacaacggtacacattgcggagctagtcaaggcatgtcatccgtcacccgatgttgtgagcgctgtaggggagcacctgaactggctcaacaaactcttactcccacttaaggaatcgactcagttgcaaggaagcgagtcgtacaaggagtgccttgcactcttgggtcgtgttcacgctgcgatgaagatggtgagaattggcttagtagtgccccagctgcaatacagaatgtacggtagcctcatcaaccaaatggcccaagtagcacaaaactacgaccgagaattcaagcaattcaaattattcatcatccaaaatcaaatccttggcagctatttgctgcagcagaacagggcatttgctgagagggagctgcagatggagagctttcattctgctgtcatttctcaaagaagggaggagttggacaatacattcgcaaagatggaccgattgagcgggcaaatggaggcagagagtagtgcaatggagcaagccaaaaaggaaatggacgaaggattgaggcagttccagaataggcaagttgcgaacgccctctttgccgttcttagcgctgtagctcagattgggcttgcattccttacggctggtgcaacggctcctggggctgcagcatctgcagcgcaagctgtgaacatagccggtcaagcggcacaagctctgcgaagggtggtggaaattctagaggggctcgaggctgtgatggaggttgtggctgctataaagcaccttgtggatgctctggaccaggtaagtcagattgtggacgcaccggtgatgccggaattgccctcagaggcggactggtccatttttgtgaacgaggtggaggccgtggcagagggcatgccaacggaagtctcggaggttccggcgtggaaggccaagtgcaagaatgtggctgcactgggtagggagatgagcatcacggcagtacagatgtcggagctgcagtatgacatctgggtgcaaggcttgttgcgggatatggctcgaagccaggcagacaggctggccgcgattcaacccgcggaccttaccaactatttggagatggctacccagatggatatgcggactacgaggatgctgctggggctcctcaacatattgcgcatccagaatgcggcgctcaggtacgagtatcttctaatgcccacggagctcacaacatggccactgggtatggataccgtgggtgacttgctcatcacgcacgagagtgctgcactgtcaggattagctcagttagggcccccatcggacttcacgagcaggcatgtggtgaaaggcatacctgtgagcttgctgctcgatggcgaggattgggagtttgagattcctgtgcaagctggcatgtccagtttcccttccagctggtctcgcgtccgtattcggcacctggagatgcactttgtgaaggaggccagcggtattggtggtgagattatccaccagcctaccacccagactgggaccgtttacatcctcctgcagggctccactgtcttccatgatcgcagaagggaggaggtgatgacctttcaggccgctgctccgctcaactaccattacgcgtaccgcctcgacactggagaagccactcttacgaacgagccctcggaacagtttgccaacacattcatgcagatgacacccttcacccgttggaggctacgtctgtctgcgtccgcaaaagagaatgcaggattagcctttcccacagctacagctcccgactccaccactgagattgccatcactttccatgttacggccatcagacaaattgactggcggcacgacgaagagtagc

SEQ ID NO: 481 - DNA, 2598 bp, Artificial Sequence
  Synthetic
atggctctcgtggattacggcaagcttttcgaggatctgaaccagataagcatgggtgtactggatcgggtagagttttcagaggtgatggtgatccacaggatgtatgtgaggctagctgatctgaatgtggggcagctcgagggagccgagaaagtgaagcggttgtatgtgtttgcggacgtggtggagctaccagtcgtggaatggcggtggccgccgcaaataccaggatcggtgacggtgatcatattgtgtcgtcttcttcaatggccaactgatgggaggcagtcggacaccgagctccacctgacattcatgaagttgcatgccatacaacgagaggaaaatcggtgggagataaccgcagcagatggcatgaactggggagtttacatacacgcagaggaagtacaggttggcgtgctgacaatgtcatggtcttcggtacttagagtttcggcacttcgctctgttataacctccggctttcgcgccgttagtgtgtttgaggtaccgggaagtgtaaggtccacccttggagctactttaaggcccgatcacgccttatatagtacaactatgcaagccacacccaacgcatcgcatattagtgcttttaaccttcgcatagtttccccgtcggcatatcgtgtttgtcctctccaaaatgacacagatacctacttaggtattccagcagacgtggcggcagttcttccagtagacgtggtgactgatcctaacatcttgctgggcatgcagacaacggtacacattgcggagctagtcaaggcatgtcatccgtcacccgatgttgtgagcgctgtaggggagcacctgaactggctcaacaaactcttactcccacttaaggaatcgactcagttgcaaggaagcgagtcgtacaaggagtgccttgcactcttgggtcgtgttcacgctgcgatgaagatggtgagaattggcttagtagtgccccagctgcaatacagaatgtacggtagcctcatcaaccaaatggcccaagtagcacaaaactacgaccgagaattcaagcaattcaaattattcatcatccaaaatcaaatccttggcagctatttgctgcagcagaacagggcatttgctgagagggagctgcagatggagagctttcatgctgctgtcatttctcaaagaagggaggagttggacgacgccatcgctaagatggaccgactgagcttgcagatggaggaagaggacagagcaatggagcaagccaaaaaggaaatggacgaaggattgaggcagttccagaataggcaagttgcgaacgccctctttgccgttcttagcgctgtagctcagattgggctcgcattcgtcacggctggtgcaacggctcctggagctgtggcgtcggcggggcaagctgtgagcatagcaggtcaggcggcgcaaggtctgcgaagggtggtggaaattctagaggggctcgaggctgtgatggaggttgtggctgctgtgaaggacctcgtggattcattggaacaggtaggtcagattgtggacgcaccggtgatgccagacatgccctcggaggcggactggagtatttttgtgaacgaggtggaggccgtggcagaggggatgccgacggaagtctcggaggttccggtgtggagggccaagtgcaagaatgtggctgcactgggtagggagatgtgcatcacggcagtacagatgtcggagctgcagtatgacatctgggtgcaaggcatgatgcgggatatggctcgaagccaggcagacaggctggccgcaattcaacccgcggaccttaccaactatttggagatggctacccagatggatatgcggactacgaggatgctgctggggctcctcaacataatgcgcatccagaatgcggcacttatgtatgagtaccttctaacgcccacgcagctcactgcatggccgctgagaatggatactgtggccaacttgctcatcacgcaggagaatgctgcactgataggattaatgcagctagggccctcatctgatttcacgagcaggcatgtggtgaaagacatacctgtgaacttgctgctcgatggcgaggattgggagtttgagattcctgtgcaaggtggcatgtccagcttcccttccagctggtctcgcgtccgtattcggcacctggagatgcactttgtgcaggaggcgagcggtggcggcgagattatccaccagcctaccacccagactgggaccgtttacatccttctgcagggttccactatcttccatgaccgcagaagagaccaggtgttgccttttcaggccgctgctccgctcaactaccattacgcgtaccgcctcgacaccggcgactccactctcacaaacgaaccctctgaacagtttgccaacaagttcatgcagatgacacccttcacccgttggaggcttcgtctgtctgcgtccgcagcggagaataaaggattagcctttcccacagctacagctcccgactccaccactgagattgccatcactttccatgttacggccattagacaaattgactggcggcaagaggaggag

SEQ ID NO: 482 - DNA, 2598 bp, Artificial Sequence
  Synthetic
atggctctcgtggattacggcaagcttttcgaggatctgaaccagataagcatgggtgtactggatcgggtagagttttcagaggtgatggtgatccacaggatgtatgtgaggctagctgatctgaatgtggggcagctcgagggagccgagaaagtgaagcggttgtatgtgtttgcggacgtggtggagctaccagtcgtggaatggcggtggccgccgcaaataccaggatcggtgacggtgatcatattgtgtcgtcttcttcaatggccaactgatgggaggcagtcggacaccgagctccacctgacattcatgaagttgcatgccatacaacgagaggaaaatcggtgggagataaccgcagcagatggcatgaactggggagtttacatacacgcagaggaagtacaggttggcgtgctgacaatgtcatggtcttcggtacttagagtttcggcacttcgctctgttataacctccggctttcgcgccgttagtgtgtttgaggtaccgggaagtgtaaggtccacccttggagctactttaaggcccgatcacgccttatatagtacaactatgcaagccacacccaacgcatcgcatattagtgcttttaaccttcgcatagtttccccgtcggcatatcgtgtttgtcctctccaaaatgacacagatacctacttaggtattccagcagacgtggcggcagttcttccagtagacgtggtgactgatcctaacatcttgctgggcatgcagacaacggtacacattgcggagctagtcaaggcatgtcatccgtcacccgatgttgtgagcgctgtaggggagcacctgaactggctcaacaaactcttactcccacttaaggaatcgactcagttgcaaggaagcgagtcgtacaaggagtgccttgcactcttgggtcgtgttcacgctgcgatgaagatggtgagaattggcttagtagtgccccagctgcaatacagaatgtacggtagcctcatcaaccaaatggcccaagtagcacaaaactacgaccgagaattcaagcaattcaaattattcatcatccaaaatcaaatccttggcagctatttgctgcagcagaacagggcatttgctgagagggagctgcagatggagagctttcatgctgctgtcatttctcaaagaaggcaggagttggacgacgccatcgctaagatggaccgactgagcttgcagatggaggaagaggacagagcaatggagcaagccaaaaaggaaatggacgaaggattgaggcagttccagaataggcaagttgcgaacgccctctttgccgttcttagcgctgtagctcagattgggcttgcatcccttacggctggtgcaacggctcctggagctgtggcgtcggcggggcaagctgtgagcatagcaggtcaggcggcgcaaggtctgcgaagggtggtggaaattctagaggggctcgaggctgtgatggaggttgtggctgctgtgaaggacctcgtggattcattggaacaggtaggtcagattgtggacgcaccggtgatgccggaattgccctcagaggcggactggtccatttttgtgaacgaggtggaggccgtggcagagggcatgccaacggaagtctcggaggttccggtgtggagggccaagtgcaagaatgtggctgcactgggtagggagatgtgcatcacggcagaacagatgtcggagctgcagtatgacatctgggtgcaaggcatgatgcgggatatggctcgaagccaggcagacaggctggccgcaattcaacccgcggaccttaccaactatttggagatggcaatacagatggatatgcggactacgaggatgctgctggggctcctcaacatattgcgcatccagaatgcggcgctcaggtacgagtatcttctaatgcccacggagctcacaacatggccactgggtatggataccgtgggtgacttgctcatcgcgcaggagaatgctgcactgataggattaatgcagctagggccctcatctgatttcacgagcaggcatgtggtgaaagacatacctgtgaacttgctgctcgatggcgaggattgggagtttgagattcctgtgcaagctggcatgtccagcttcccttccagctggtctcgcgtccgtattcggcacctggagatgcactttgtgcaggaggcgagcggtggcggcgagattatccaccagcctgccacccagacggggaccgtttacatccttctgcagggttccactatcttccatgatcgcagaagggaggaggtgatgacctttcaggcagcggttccgctcaactaccattacgcgtaccgcctcgacaccggcgactccactctcacaaacgaaccctctgaacagtttgccaacaagttcatgcagatgacaccgttcactcgctggaggctacgtctgtctgcgtccgcaaaagagaatgcaggattagcctttcccacagctacagctcccgactccaccactgagattgccatcactttccatgttacggccattagacaaattgactggcggcacgacgaggag

SEQ ID NO: 483 - DNA, 2598 bp, Artificial Sequence
  Synthetic
atggctctcgtggattacggcaagcttttcgaggatctgaaccagataagcatgggtgtactggatcgggtagagttttcagaggtgatggtgatccacaggatgtatgtgaggctagctgatctgaatgtggggcagctcgagggagccgagaaagtgaagcggttgtatgtgtttgcggacgtggtggagctaccagtcgtggaatggcggtggccgccgcaaataccaggatcggtgacggtgatcatattgtgtcgtcttcttcaatggccaactgatgggaggcagtcggacaccgagctccacctgacattcatgaagttgcatgccatacaacgagaggaaaatcggtgggagataaccgcagcagatggcatgaactggggagtttacatacacgcagaggaagtacaggttggcgtgctgacaatgtcatggtcttcggtacttagagtttcggcacttcgctctgttataacctccggctttcgcgccgttagtgtgtttgaggtaccgggaagtgtaaggtccacccttggagctactttaaggcccgatcacgccttatatagtacaactatgcaagccacacccaacgcatcgcatattagtgcttttaaccttcgcatagtttccccgtcggcatatcgtgtttgtcctctccaaaatgacacagatacctacttaggtattccagcagacgtggcggcagttcttccagtagacgtggtgactgatcctaacatcttgctgggcatgcagacaacggtacacattgcggagctagtcaaggcatgtcatccgtcacccgatgttgtgagcgctgtaggggagcacctgaactggctcaacaaactcttactcccacttaaggaatcgactcagttgcaaggaagcgagtcgtacaaggagtgccttgcactcttgggtcgtgttcacgctgcgatgaagatggtgagaattggcttagtagtgccccagctgcaatacagaatgtacggtagcctcatcaaccaaatggcccaagtagcacaaaactacgaccgagaattcaagcaattcaaattattcatcatccaaaatcaaatccttggcagctatttgctgcagcagaacagggcatttgctgagagggagctgcagatggagagctttcatgctgctgtcatttctcaaagaaggcaggagttggacgacgccatcgctaagatggaccgactgagcttgcagatggaggaagaggacagagcaatggagcaagcccgaaaagaaatggaagaaggattgaggcagttccagaatgagcaagttgcaagggctgtgttcgctgttcttaaatctgtagctatgattgcgctcgcattcgtcacggctggtgcaacggctcctggagctgtggcgtcggcggggcaagctgtgagcatagcaggtcaggcggcgcaaggtctgcgaagggtggtggaaattctagaggggctcgaggctgtgatggaggttgtggctgctgtgaaggacctcgtggattcattggaacaggtaggtcagattgtggacgcaccggtgatgccggaattgccctcagaggcggactggtccatttttgtgaacgaggtggaggccgtggcagaggggatgccgacggaagtctcggaggttccggcgtggagggccaagtgcaagaatgtggctgcactgggtcgggagatgtgcatcacggcagtacagatgtcggagctgcagtatgacatctgggtgcaaggcatgatgcgggatatggctcgaagccaggcagacaggctggccgcaattcaacccgcggaccttaccaactatttggagatggcaatacagatggatatgcggactacgaggatgctgctggggctcctcaacatattgcgcatccagaatgcggcgctcaggtacgagtatcttctaatgcccacggagctcacaacatggccactgggtatggataccgtgggtgacttgctcatcgcgcacgagagtgctgcactgtcaggattagctcagttagggcccccatcggacttcacgagcaggcatgtagtgaaaggcatacctgtgagcttgcttctagacggtggggattgggaatttgagattcctgtgcaaggtggcatgtccagtttcccttccagctggactcgagtgcggattcggcacctggagatgcactttgtgcaggaggcgagcggtggcggcgagattatccaccagcctgccacccagacggggaccatttacatcctcctgcagggctccactgtcttccatgaccgcagaagagaccaggtgttgccttttcaggccgctgctccgctcaactaccattacgcgtaccgcctcgacaccggcgactccactctcacaaacgaaccctctgaacagtttgccaacaagttcatgcagatgacaccgttcactcactggaggctacgtctgtctgcgtccgcaaaagagaatgcaggattagcctttcccacggctacagcacttgactccactacccagattgtcatcactttccatgttacggccatcagacaaattgactggcggcaagaggaggag

SEQ ID NO: 484 - DNA, 2605 bp, Artificial Sequence
  Synthetic
atggctctcgtggattacggcaagcttttcgaggatctgaaccagataagcatgggtgtactggatcgggtagagttttcagaggtgatggtgatccacaggatgtatgtgaggctagctgatctgaatgtggggcagctcgagggagccgagaaagtgaagcggttgtatgtgtttgcggacgtggtggagctaccagtcgtggaatggcggtggccgccgcaaataccaggatcggtgacggtgatcatattgtgtcgtcttcttcaatggccaactgatgggaggcagtcggacaccgagctccacctgacattcatgaagttgcatgccatacaacgagaggaaaatcggtgggagataaccgcagcagatggcatgaactggggagtttacatacacgcagaggaagtacaggttggcgtgctgacaatgtcatggtcttcggtacttagagtttcggcacttcgctctgttataacctccggctttcgcgccgttagtgtgtttgaggtaccgggaagtgtaaggtccacccttggagctactttaaggcccgatcacgccttatatagtacaactatgcaagccacacccaacgcatcgcatattagtgcttttaaccttcgcatagtttccccgtcggcatatcgtgtttgtcctctccaaaatgacacagatacctacttaggtattccagcagacgtggcggcagttcttccagtagacgtggtgactgatcctaacatcttgctgggcatgcagacaacggtacacattgcggagctagtcaaggcatgtcatccgtcacccgatgttgtgagcgctgtaggggagcacctgaactggctcaacaaactcttactcccacttaaggaatcgactcagttgcaaggaagcgagtcgtacaaggagtgccttgcactcttgggtcgtgttcacgctgcgatgaagatggtgagaattggcttagtagtgccccagctgcaatacagaatgtacggtagcctcatcaaccaaatggcccaagtagcacaaaactacgaccgagaattcaagcaattcaaattattcatcatccaaaatcaaatccttggcagctatttgctgcagcagaacagggcatttgctgagagggagctgcagatggagagctttcatgctgctgtcatttctcaaagaaggcaggagttggacaatacattcgcaaagatggaccgattgagcgggcaaatggaggaagaggacagagcaatggagcaagcccgaaaagaaatggaagaaggattgaggcagttccagaataggcaagttgcgaacgccctctttgccgttcttagcgctgtagctcagattgggcttgcattccttacggctggtgcaacggctcctggagctgtggcgtcggcggggcaagctgtgagcatagcaggtcaggcggcgcaaggtctgcgaagggtggtggaaattctagaggggctcgaggctgtgatggaggttgtggctgctgtgaaggacctcgtggattcattggaacaggtaggtcagattgtggacgcaccggtgatgccggaattgccctcagaggcggactggtccatttttgtgaatgagattgaagccgtggcagaggggatgccgacggaagtctcggaggttccggcgtggaaggccaagtgcaagaatgtggctgcactgggtagggagatgagcatcacggcagtacagatgtcggagctgcagtatgacatctgggtgcaaggcatgatgcgggatatggctcgaagccaggcagacaggctggccgcaattcaacccgcggaccttaccaactatttggagatggctacccagatggatatgcggactacgaggatgctgctggggctcctcaacataatgcgcatccagaatgcggcacttatgtatgagtaccttctaacgcccacgcagctcactgcatggccactgggtatggataccgtgggtgacttgctcatcacgcacgagagtgctgcactgtcaggattagctcagttagggcccccatcggacttcacgagcaggcatgtagtgaaaggcatacctgtgagcttgcttctagacggtggggattgggaatttgagattcctgtgcaaggtggcatgtccagtttcccttccagctggtctcgcgtccgtattcggcacctggagatgcactttgtgaaggaggccagcggtattggtggtgagattatccaccagcctgccacccagacggggaccatttacatcctcctgcagggctccactgtcttccatgatcgcagaagagaccaggtgttgccttttcaggccgctgctccgctcaactaccattacgcgtaccgcctcgacactggagaagccactcttacgaacgaaccctctgaacagtttgccaacaagttcatgcagatgacacccttcacccgttggaggcttcgtctgtctgcgtccgcaaaagagaatgcaggattagcctttcccacggctacagcacttgactccactacccagattgtcatcactttccatgttacggccatcagacaaattgactggcggcaagaggaggagtagc

SEQ ID NO: 485 - DNA, 2602 bp, Artificial Sequence
  Synthetic
atggctctcgtggattacggcaagcttttcgaggatctgaaccagataagcatgggtgtactggatcgggtagagttttcagaggtgatggtgatccacaggatgtatgtgaggctagctgatctgaatgtggggcagctcgagggagccgagaaagtgaagcggttgtatgtgtttgcggacgtggtggagctaccagtcgtggaatggcggtggccgccgcaaataccaggatcggtgacggtgatcatattgtgtcgtcttcttcaatggccaactgatgggaggcagtcggacaccgagctccacctgacattcatgaagttgcatgccatacaacgagaggaaaatcggtgggagataaccgcagcagatggcatgaactggggagtttacatacacgcagaggaagtacaggttggcgtgctgacaatgtcatggtcttcggtacttagagtttcggcacttcgctctgttataacctccggctttcgcgccgttagtgtgtttgaggtaccgggaagtgtaaggtccacccttggagctactttaaggcccgatcacgccttatatagtacaactatgcaagccacacccaacgcatcgcatattagtgcttttaaccttcgcatagtttccccgtcggcatatcgtgtttgtcctctccaaaatgacacagatacctacttaggtattccagcagacgtggcggcagttcttccagtagacgtggtgactgatcctaacatcttgctgggcatgcagacaacggtacacattgcggagctagtcaaggcatgtcatccgtcacccgatgttgtgagcgctgtaggggagcacctgaactggctcaacaaactcttactcccacttaaggaatcgactcagttgcaaggaagcgagtcgtacaaggagtgccttgcactcttgggtcgtgttcacgctgcgatgaagatggtgagaattggcttagtagtgccccagctgcaatacagaatgtacggtagcctcatcaaccaaatggcccaagtagcacaaaactacgaccgagaattcaagcaattcaaattattcatcatccaaaatcaaatccttggcagctatttgctgcagcagaacagggcatttgctgagagggagctgcagatggagagctttcattcagcggtcatttctcaaagaaggcaggagttggacgacgccatcgctaagatggaccgattgagcgggcaaatggaggcagagagtagtgcaatggagcaagccaaaaaggaaatggacgaaggattgaggcagttccagaataggcaagttgcgaacgccctctttgccgttcttagcgctgtagctcagattgggcttgcactccttacggctggtgcaacggctcctggagctgtggcgtcggcggggcaagctgtgagcatagcaggtcaggcggcgcaaggtctgcgaagggtggtggaaactctagagcagctggaggctgtgatggaggttgtggctgctgtgaaggacctcgtggattcattggaacaggtaggtcagattgtggatgcaccacctatgccagacatgccctcggaggcggactggtccatttttgtgaatgagattgaagccgtggcagaggggatgccgacggaagtctcggaggttccggcgtggaaggccaagtgcaagaatgtggctgcactgggtcgggagatgagcatcacggcagtacagatgtcggagctgcagtatgacatctgggtgcaaggcatgatgcgggatatggctcgaagccaggcagacaggctggccgcaattcaacccgcggaccttaccaactatttggagatggctacccagatggatatgcggactacgaggatgctgctggggctcctcaacatattgcgcatccagaatgcggcgctcaggtacgagtatcttctaatgcccacggagctcacaacatggccactgggtatggataccgtgggtgacttgctcatcgcgcaggagaatgctgcactgataggattaatgcagctagggccctcatctgatttcacgagcaggcatgtggtgaaaggcatacctgtgagcttgcttctagacggtggggattgggaatttgagattcctgtgcaaggtggcatgtccagcttcccttccagctggtctcgcgtccgtattcggcacctggagatgcactttgtgcaggaggcgagcggtggcggcgagattatccaccagcctaccacccagactgggaccgtttacatccttctgcagggttccactatcttccatgaccgcagaagggaggaggtgatgacctttcaggcagcggttccgctcaactaccattacgcgtaccgcctcgacactggagaagccactcttacgaacgagccctcggaacagtttgccaacaagttcatgcagatgacacccttcacccgttggaggcttcgtctgtctgcgtccgcaaaagagaatgcaggattagcctttcccacggctacagcacttgactccactacccagattgtcatcactttccatgttacggccatcagacaaattgactggcggcacgacgaagagtagc

SEQ ID NO: 486 - DNA, 2601 bp, Artificial Sequence
  Synthetic
atggctctcgtggattacggcaagcttttcgaggatctgaaccagataagcatgggtgtactggatcgggtagagttttcagaggtgatggtgatccacaggatgtatgtgaggctagctgatctgaatgtggggcagctcgagggagccgagaaagtgaagcggttgtatgtgtttgcggacgtggtggagctaccagtcgtggaatggcggtggccgccgcaaataccaggatcggtgacggtgatcatattgtgtcgtcttcttcaatggccaactgatgggaggcagtcggacaccgagctccacctgacattcatgaagttgcatgccatacaacgagaggaaaatcggtgggagataaccgcagcagatggcatgaactggggagtttacatacacgcagaggaagtacaggttggcgtgctgacaatgtcatggtcttcggtacttagagtttcggcacttcgctctgttataacctccggctttcgcgccgttagtgtgtttgaggtaccgggaagtgtaaggtccacccttggagctactttaaggcccgatcacgccttatatagtacaactatgcaagccacacccaacgcatcgcatattagtgcttttaaccttcgcatagtttccccgtcggcatatcgtgtttgtcctctccaaaatgacacagatacctacttaggtattccagcagacgtggcggcagttcttccagtagacgtggtgactgatcctaacatcttgctgggcatgcagacaacggtacacattgcggagctagtcaaggcatgtcatccgtcacccgatgttgtgagcgctgtaggggagcacctgaactggctcaacaaactcttactcccacttaaggaatcgactcagttgcaaggaagcgagtcgtacaaggagtgccttgcactcttgggtcgtgttcacgctgcgatgaagatggtgagaattggcttagtagtgccccagctgcaatacagaatgtacggtagcctcatcaaccaaatggcccaagtagcacaaaactacgaccgagaattcaagcaattcaaattattcatcatccaaaatcaaatccttggcagctatttgctgcagcagaacagggcatttgctgagagggagctgcagatggagagctttcattctgctgtcatttctcaaagaaggcaggagttggacgacgccatcgctaagatggaccgactgagcttgcagatggaggaagaggacagagcaatggagcaagcccgaaaagaaatggaagaaggattgaggcagttccagaataggcaagttgcgaacgccctctttgccgttcttaaatctgtagctatgattgcgctcgcattcgtcacggctggtgcaacggctcctggggctgtggcgtcggcggggcaagctgtgagcatagcaggtcaggcggcgcaaggtctgcgaagggtggtggaaattctagagcagctggaggctgtgatggaggttgtggctgctgtgaaggacctcgtggattcattggaacaggtaggtcagattgtggacgcaccggtgatgccagacatgccctcggaggcggactggagtatttttgtgaacgaggtggaggccgtggcagagggcatgccaacggaagtctcggaggttccggtgtggagggccaagtgcaagaatgtggctgcactgggtcgggagatgagcatcacggcagtacagatgtcggagctgcagtatgacatctgggtgcaaggcatgatgcgggatatggctcgaagccaggcagacaggctggcagcgattcaacctgctaatcttaccaactatttggagatggctacccagatggatatgcggactacgaggatgctgctggggctcctcaacataatgcgcatccagaatgcggcgctcaggtacgagtatcttctaatgcccacggagctcacaacatggccactgggtatggataccgtgggtgacttgctcatcgcgcaggagaatgctgcactgataggattaatgcagctagggccctcatctgatttcacgagcaggcatgtagtgaaaggcatacctgtgagcttgcttctagacggtggggattgggagtttgagattcctgtgcaaggtggcatgtccagcttcccttccagctggtctcgcgtccgtattcggcacctggagatgcactttgtgcaggaggccagcggtattggtggtgagattatccaccagcctgccacccagacggggaccatttacatcctcctgcagggctccactgtcttccatgatcgcagaagagaccaggtgttgccttttcaggccgctgctccgctcaactaccattacgcgtaccgcctcgacaccggcgactccactctcacaaacgaaccctctgaacagtttgccaacaagttcatgcagatgacacccttcacccgttggaggctacgtctgtctgcgtccgcaaaagagaatgcaggattagcctttcccacggctacagcacttgactccaccactgagattgccatcactttccatgttacggccatcagacaaattgactggcggcaagaggaggag

SEQ ID NO: 487 - DNA, 2598 bp, Artificial Sequence
  Synthetic
atggctctcgtggattacggcaagcttttcgaggatctgaaccagataagcatgggtgtactggatcgggtagagttttcagaggtgatggtgatccacaggatgtatgtgaggctagctgatctgaatgtggggcagctcgagggagccgagaaagtgaagcggttgtatgtgtttgcggacgtggtggagctaccagtcgtggaatggcggtggccgccgcaaataccaggatcggtgacggtgatcatattgtgtcgtcttcttcaatggccaactgatgggaggcagtcggacaccgagctccacctgacattcatgaagttgcatgccatacaacgagaggaaaatcggtgggagataaccgcagcagatggcatgaactggggagtttacatacacgcagaggaagtacaggttggcgtgctgacaatgtcatggtcttcggtacttagagtttcggcacttcgctctgttataacctccggctttcgcgccgttagtgtgtttgaggtaccgggaagtgtaaggtccacccttggagctactttaaggcccgatcacgccttatatagtacaactatgcaagccacacccaacgcatcgcatattagtgcttttaaccttcgcatagtttccccgtcggcatatcgtgtttgtcctctccaaaatgacacagatacctacttaggtattccagcagacgtggcggcagttcttccagtagacgtggtgactgatcctaacatcttgctgggcatgcagacaacggtacacattgcggagctagtcaaggcatgtcatccgtcacccgatgttgtgagcgctgtaggggagcacctgaactggctcaacaaactcttactcccacttaaggaatcgactcagttgcaaggaagcgagtcgtacaaggagtgccttgcactcttgggtcgtgttcacgctgcgatgaagatggtgagaattggcttagtagtgccccagctgcaatacagaatgtacggtagcctcatcaaccaaatggcccaagtagcacaaaactacgaccgagaattcaagcaattcaaattattcatcatccaaaatcaaatccttggcagctatttgctgcagcagaacagggcatttgctgagagggagctgcagatggagagctttcatgctgctgtcatttctcaaagaagggaggagttggacaatacattcgcaaagatggaccgattgagcgggcaaatggaggcagagagtagtgcaatggagcaagccaaaaaggaaatggacgaaggattgaggcagttccagaataggcaagttgcgaacgccctctttgccgttcttagcgctgtagctcagattgggcttgcattccttacggctggtgcaacggctcctggggctgcagcatctgcagcgcaagctgtgaacatagccggtcaggcggcgcaaggtctgcgaagggtggtggaaattctagaggggctcgaggctgtgatggaggttgtggctgctgtgaaggacctcgtggattcattggaacaggtaggtcagattgtggacgcaccggtgatgccggaattgccctcagaggcggactggagtatttttgtgaacgaggtggaggccgtggcagaggggatgccgacggaagtctcggaggttccggcgtggaaggccaagtgcaagaatgtggctgcactgggtcgggagatgagcatcacggcagaacagatttcccagctccagtatgacatctgggtgcaaggcatgatgcgggatatggctcgaagccaggcagacaggctggccgcaattcaacccgcggaccttaccaactatttggagatggctacccagatggatatgcggactacgaggatgctgctggggctcctcaacatattgcgcatccagaatgcggcgctcaggtacgagtatcttctaatgcccacggagctcacaacatggccactgggtatggataccgtgggtgacttgctcatcgcgcaggagaatgctgcactgataggattagctcagttagggcccccatcggacttcacgagcaggcatgtagtgaaaggcatacctgtgagcttgcttctagacggtggggattgggaatttgagattcctgtgcaagctggcatgtccagtttcccttccagctggactcgagtgcggattcggcacctggagatgcactttgtgcaggaggcgagcggtggcggcgagattatccaccagcctgccacccagacggggaccatttacatcctcctgcagggctccactgtcttccatgatcgcagaagggaggaggtgatgacctttcaggccgctgctccgctcaactaccattacgcgtaccgcctcgacaccggcgactccactctcacaaacgaaccctctgaacagtttgccaacacattcatgcagatgacaccgttcactcactggaggctacgtctgtctgcgtccgcaaaagagaatgcaggattagcctttcccacggctacagcacttgactccaccactgagattgccatcactttccatgttacggccatcagacaaattgactggcggcaagaggaggag

SEQ ID NO: 488 - DNA, 2605 bp, Artificial Sequence
  Synthetic
atggctctcgtggattacggcaagcttttcgaggatctgaaccagataagcatgggtgtactggatcgggtagagttttcagaggtgatggtgatccacaggatgtatgtgaggctagctgatctgaatgtggggcagctcgagggagccgagaaagtgaagcggttgtatgtgtttgcggacgtggtggagctaccagtcgtggaatggcggtggccgccgcaaataccaggatcggtgacggtgatcatattgtgtcgtcttcttcaatggccaactgatgggaggcagtcggacaccgagctccacctgacattcatgaagttgcatgccatacaacgagaggaaaatcggtgggagataaccgcagcagatggcatgaactggggagtttacatacacgcagaggaagtacaggttggcgtgctgacaatgtcatggtcttcggtacttagagtttcggcacttcgctctgttataacctccggctttcgcgccgttagtgtgtttgaggtaccgggaagtgtaaggtccacccttggagctactttaaggcccgatcacgccttatatagtacaactatgcaagccacacccaacgcatcgcatattagtgcttttaaccttcgcatagtttccccgtcggcatatcgtgtttgtcctctccaaaatgacacagatacctacttaggtattccagcagacgtggcggcagttcttccagtagacgtggtgactgatcctaacatcttgctgggcatgcagacaacggtacacattgcggagctagtcaaggcatgtcatccgtcacccgatgttgtgagcgctgtaggggagcacctgaactggctcaacaaactcttactcccacttaaggaatcgactcagttgcaaggaagcgagtcgtacaaggagtgccttgcactcttgggtcgtgttcacgctgcgatgaagatggtgagaattggcttagtagtgccccagctgcaatacagaatgtacggtagcctcatcaaccaaatggcccaagtagcacaaaactacgaccgagaattcaagcaattcaaattattcatcatccaaaatcaaatccttggcagctatttgctgcagcagaacagggcatttgctgagagggagctgcagatggagagctttcattctgctgtcatttctcaaagaagggaggagttggacaatacattcgcaaagatggaccgactgagcgggcaaatggaggcagagagtagtgcaatggagcaagccaaaaaggaaatggacgaaggattgaggcagttccagaataggcaagttgcgaacgccctctttgccgttcttagcgctgtagctcagattgggcttgcattccttacggctggtgcaacggctcctggagctgtggcgtcggcggggcaagctgtgagcatagcaggtcaggcggcgcaaggtctgcgaagggtggtggaaattctagagcagctggaggctgtgatggaggttgtggctgctgtgaaggacctcgtggattcattggaacaggtaggtcagattgtggacgcaccggtgatgccagacatgccctcagaggcggactggtccatttttgtgaacgaggtggaggccgtggcagagggcatgccaacggaagtctcggaggttccggtgtggagggccaagtgcaagaatgtggctgcactgggtcgggagatgagcatcacggcagtacagatgtcggagctgcagtatgacatctgggtgcaaggcttgttgcgggatatagctcaaagccacgcagaccggctggcagcgattcaacctgctaatcttaccaactatttggagatggctacccagatggatatgcggactacgaggatgctgctggggctcctcaacatattgcgcatccagaatgcggcgctcaggtacgagtatcttctaatgcccacggagctcacaacatggccactgggtatggatactgtggccaacttgctcatcacgcacgagagtgctgcactgtcaggattagctcagttagggcccccatcggacttcacgagcaggcatgtagtgaaaggcatacctgtgagcttgcttctagacggtggggattgggaatttgagattcctgtgcaaggtggcatgtccagtttcccttccagctggactcgagtgcggattcggcacctggagatgcactttgtgcaggaggccagcggtattggcggtgagattatccaccagcctaccacccagactgggaccgtttacatccttctgcagggttccactaccttccatgaccgcagaagagaccaggtgttgccttttcaggccgctgctccgctcaactaccattacgcgtaccgcctcgacaccggcgactccactctcacaaacgaaccctctgaacagtttgccaacaagttcatgcagatgacacccttcacccgttggaggcttcgtctgtctgcgtccgcagcggagaataaaggattagcctttcccacagctacagctcccgactccaccactgagattgccatcactttccatgttacggccatcagacaaattgactggcggcacgacgaagagtagc

SEQ ID NO: 489 - DNA, 2605 bp, Artificial Sequence
  Synthetic
atggctctcgtggattacggcaagcttttcgaggatctgaaccagataagcatgggtgtactggatcgggtagagttttcagaggtgatggtgatccacaggatgtatgtgaggctagctgatctgaatgtggggcagctcgagggagccgagaaagtgaagcggttgtatgtgtttgcggacgtggtggagctaccagtcgtggaatggcggtggccgccgcaaataccaggatcggtgacggtgatcatattgtgtcgtcttcttcaatggccaactgatgggaggcagtcggacaccgagctccacctgacattcatgaagttgcatgccatacaacgagaggaaaatcggtgggagataaccgcagcagatggcatgaactggggagtttacatacacgcagaggaagtacaggttggcgtgctgacaatgtcatggtcttcggtacttagagtttcggcacttcgctctgttataacctccggctttcgcgccgttagtgtgtttgaggtaccgggaagtgtaaggtccacccttggagctactttaaggcccgatcacgccttatatagtacaactatgcaagccacacccaacgcatcgcatattagtgcttttaaccttcgcatagtttccccgtcggcatatcgtgtttgtcctctccaaaatgacacagatacctacttaggtattccagcagacgtggcggcagttcttccagtagacgtggtgactgatcctaacatcttgctgggcatgcagacaacggtacacattgcggagctagtcaaggcatgtcatccgtcacccgatgttgtgagcgctgtaggggagcacctgaactggctcaacaaactcttactcccacttaaggaatcgactcagttgcaaggaagcgagtcgtacaaggagtgccttgcactcttgggtcgtgttcacgctgcgatgaagatggtgagaattggcttagtagtgccccagctgcaatacagaatgtacggtagcctcatcaaccaaatggcccaagtagcacaaaactacgaccgagaattcaagcaattcaaattattcatcatccaaaatcaaatccttggcagctatttgctgcagcagaacagggcatttgctgagagggagctgcagatggagagctttcattcagcggtcatttctcaaagaaggcaggagttggacgacgccatcgctaagatggaccgactgagcttgcagatggaggaagaggacagagcaatggagcaagcccgaaaagaaatggaagaaggattgaagcagttccagaatgagcaagttgcaagggctgtgttcgctgttcttaaatctgtagctatgattgcgctcgcattcgtcacggctggtgcaacggctcctggagctgtggcgtcggcggggcaagctgtgagcatagcaggtcaggcggcgcaaggtctgcgaagggtggtggaaattctagaggggctcgaggctgtgatggaggttgtggctgctgtgaaggacctcgtggattcattggaacaggtaggtcagattgtggatgcaccacctatgccagacatgccctcggaggcggactggtccatttttgtgaacgaggtggaggccgtggcagagggcatgccaacggaagtctcggaggttccggcgtggaaggccaagtgcaagaatgtggctgcactgggtagggagatgtgcatcacggcagaacagatttcccagctccagtatgacatctgggtgcaaggcatgatgcgggatatggctcgaagccaggcagacaggctggccgcaattcaacccgcggaccttaccaactatttggagatggcaatacagatggatatgcggactacgaggatgctgctggggctcctcaacatattgcgcatccagaatgcggcgctcaggtacgagtatcttctaatgcccacggagctcacaacatggccgctgagaatggatactgtggccaacttgctcatcacgcacgagagtgctgcactgtcaggattagctcagttagggcccccatcggacttcacgagcaggcatgtggtgaaagacatacctgtgaacttgctgctcgatggcgaggattgggagtttgagattcctgtgcaaggtggcatgtccagtttcccttccagctggtctcgcgtccgtattcggcacctggagatgcactttgtgaaggaggccagcggtattggtggcgagattatccaccagcctgccacccagactgggaccgtttacatccttctgcagggctccactgtcttccatgaccgcagaagggaggaggtgatgacctttcaggcagcggttccgctcaactaccattacgcgtaccgcctcgacaccggcgactccactctcacaaacgaaccctctgaacagtttgccaacaagttcatgcagatgacacccttcacccgttggaggcttcgtctgtctgcgtccgcaaaggagaatgcaggattagcctttcccacagctacagctcccgactccaccactgagattgccatcactttccatgttacggccattagacaaattgactggcggcacgacgaagagtagc

SEQ ID NO: 490 - DNA, 2602 bp, Artificial Sequence
  Synthetic
atggctctcgtggattacggcaagcttttcgaggatctgaaccagataagcatgggtgtactggatcgggtagagttttcagaggtgatggtgatccacaggatgtatgtgaggctagctgatctgaatgtggggcagctcgagggagccgagaaagtgaagcggttgtatgtgtttgcggacgtggtggagctaccagtcgtggaatggcggtggccgccgcaaataccaggatcggtgacggtgatcatattgtgtcgtcttcttcaatggccaactgatgggaggcagtcggacaccgagctccacctgacattcatgaagttgcatgccatacaacgagaggaaaatcggtgggagataaccgcagcagatggcatgaactggggagtttacatacacgcagaggaagtacaggttggcgtgctgacaatgtcatggtcttcggtacttagagtttcggcacttcgctctgttataacctccggctttcgcgccgttagtgtgtttgaggtaccgggaagtgtaaggtccacccttggagctactttaaggcccgatcacgccttatatagtacaactatgcaagccacacccaacgcatcgcatattagtgcttttaaccttcgcatagtttccccgtcggcatatcgtgtttgtcctctccaaaatgacacagatacctacttaggtattccagcagacgtggcggcagttcttccagtagacgtggtgactgatcctaacatcttgctgggcatgcagacaacggtacacattgcggagctagtcaaggcatgtcatccgtcacccgatgttgtgagcgctgtaggggagcacctgaactggctcaacaaactcttactcccacttaaggaatcgactcagttgcaaggaagcgagtcgtacaaggagtgccttgcactcttgggtcgtgttcacgctgcgatgaagatggtgagaattggcttagtagtgccccagctgcaatacagaatgtacggtagcctcatcaaccaaatggcccaagtagcacaaaactacgaccgagaattcaagcaattcaaattattcatcatccaaaatcaaatccttggcagctatttgctgcagcagaacagggcatttgctgagagggagctgcagatggagagctttcatgctgctgtcatttctcaaagaagggaggagttggacgacgccatcgctaagatggaccgactgagcttgcagatggaggaagaggacagagcaatggagcaagccaaaaaggaaatggacgaaggattgaggcagttccagaataggcaagttgcgaacgccctctttgccgttcttagcgctgtagctcagattgggctcgcattcgtcacggctggtgcaacggctcctggagctgtggcgtcggcggggcaagctgtgagcatagcaggtcaggcggcgcaaggtctgcgaagggtggtggaaattctagaggggctcgaggctgtgatggaggttgtggctgctgtgaaggacctcgtggattcattggaacaggtaggtcagattgtggacgcaccggtgatgccggaattgccctcagaggcggactggtccatttttgtgaacgaggtggaggccgtggcagagggcatgccaacggaagtctcggaggttccggtgtggagggccaagtgcaagaatgtggctgcactgggtcgggagatgtgcatcacggcagaacagatttcccagctccagtatgacatctgggtgcaaggcatgatgcgggatacagctcaaagccacgcagaccggctggcagcgattcaacccgcggaccttaccaactatttggagatggctacccagatggatatgcggactacgaggatgctgctggggctcctcaacatattgcgcatccagaatgcggcgctcaggtacgagtatcttctaatgcccacggagctcacaacatggccactgggtatggataccgtgggtgacttgctcatcgcgcacgagagtgctgcactgtcaggattagctcagttagggcccccatcggacttcacgagcaggcatgtggtgaaagacatacctgtgagcttgctgctcgatggcgaggattgggagtttgagattcctgtgcaagctggcatgtccagcttcccttccagctggtctcgcgtccgtattcggcacctggagatgcactttgtgaaggaggccagcggtggcggcgagattatccaccagcctaccacccagactgggaccgtttacatccttctgcagggctccactgtcttccatgaccgcagaagagaccaggtgttgccttttcaggccgctgctccgctcaactaccattacgcgtaccgcctcgacaccggcgactccactctcacaaacgaaccctctgaacagtttgccaacaagttcatgcagatgacacccttcacccgttggaggcttcgtctgtctgcgtccgcgaaagagaatgcaggattagcctttcccacagctacagctcccgactccaccactgagattgccatcactttccatgttacggccatcagacaaattgactggcggcacgacgaagagtagc

SEQ ID NO: 491 - DNA, 2598 bp, Artificial Sequence
  Synthetic
atggctctcgtggattacggcaagcttttcgaggatctgaaccagataagcatgggtgtactggatcgggtagagttttcagaggtgatggtgatccacaggatgtatgtgaggctagctgatctgaatgtggggcagctcgagggagccgagaaagtgaagcggttgtatgtgtttgcggacgtggtggagctaccagtcgtggaatggcggtggccgccgcaaataccaggatcggtgacggtgatcatattgtgtcgtcttcttcaatggccaactgatgggaggcagtcggacaccgagctccacctgacattcatgaagttgcatgccatacaacgagaggaaaatcggtgggagataaccgcagcagatggcatgaactggggagtttacatacacgcagaggaagtacaggttggcgtgctgacaatgtcatggtcttcggtacttagagtttcggcacttcgctctgttataacctccggctttcgcgccgttagtgtgtttgaggtaccgggaagtgtaaggtccacccttggagctactttaaggcccgatcacgccttatatagtacaactatgcaagccacacccaacgcatcgcatattagtgcttttaaccttcgcatagtttccccgtcggcatatcgtgtttgtcctctccaaaatgacacagatacctacttaggtattccagcagacgtggcggcagttcttccagtagacgtggtgactgatcctaacatcttgctgggcatgcagacaacggtacacattgcggagctagtcaaggcatgtcatccgtcacccgatgttgtgagcgctgtaggggagcacctgaactggctcaacaaactcttactcccacttaaggaatcgactcagttgcaaggaagcgagtcgtacaaggagtgccttgcactcttgggtcgtgttcacgctgcgatgaagatggtgagaattggcttagtagtgccccagctgcaatacagaatgtacggtagcctcatcaaccaaatggcccaagtagcacaaaactacgaccgagaattcaagcaattcaaattattcatcatccaaaatcaaatccttggcagctatttgctgcagcagaacagggcatttgctgagagggagctgcagatggagagctttcattcagcggtcatttctcaaagaaggcaggagttggacgacgccatcgctaagatggaccgactgagcttgcagatggaggaagaggacagagcaatggagcaagcccgaaaagaaatggaagaaggattgaagcagttccagaatgagcaagttgcaagggctgtgttcgctgttcttaaatctgtagctatgattgcgctcgcattcgtcacggctggtgcaacggctcctggagctgtggcgtcggcggggcaagctgtgagcatagcaggtcaggcggcgcaaggtctgcgaagggtggtggaaattctagaggggctcgaggctgtgatggaggttgtggctgctgtgaaggacctcgtggattcattggaacaggtaggtcagattgtggacgcaccggtgatgccggaattgccctcagaggcggactggtccatttttgtgaatgagattgaagccgtggcagaggggatgccgacggaagtctcggaggttccggtgtggagggccaagtgcaagaatgtggctgcactgggtagggagatgtgcatcacggcagaacagatttcccagctccagtatgacatctgggtgcaaggcatgatgcgggatatggctcgaagccaggcagacaggctggccgcaattcaacccgcggaccttaccaactatttggagatggctacccagatggatatgcggactacgaggatgctgctggggctcctcaacatattgcgcatccagaatgcggcgctcaggtacgagtatcttctaatgcccacggagctcacaacatggccactgggtatggataccgtgggtgacttgctcatcgcgcacgagagtgctgcactgtcaggattagctcagttagggcccccatcggacttcacgagcaggcatgtagtgaaaggcatacctgtgagcttgctgctcgatggcgaggattgggagtttgagattcctgtgcaaggtggcatgtccagtttcccttccagctggactcgagtgcggattcggcacctggagatgcactttgtgcaggaggcgagcggtggcggcgagattatccaccagcctaccacccagacggggaccatttacatcctcctgcagggctccactgtcttccatgatcgcagaagagaccaggtgttgccttttcaggccgctgctccgctcaactaccattacgcgtaccgcctcgacactggagaagccactctcacaaacgaaccctctgaacagtttgccaacaagttcatgcagacgacaccgttcactcactggaggctacgtctgtctgcgtccgcagcggagaataaaggattagcctttcccacagctacagctcccgactccaccactgagattgccatcactttccatgttacggccattagacaaattgactggcggcaagaggaggag

SEQ ID NO: 492 - DNA, 2598 bp, Artificial Sequence
  Synthetic
atggctctcgtggattacggcaagcttttcgaggatctgaaccagataagcatgggtgtactggatcgggtagagttttcagaggtgatggtgatccacaggatgtatgtgaggctagctgatctgaatgtggggcagctcgagggagccgagaaagtgaagcggttgtatgtgtttgcggacgtggtggagctaccagtcgtggaatggcggtggccgccgcaaataccaggatcggtgacggtgatcatattgtgtcgtcttcttcaatggccaactgatgggaggcagtcggacaccgagctccacctgacattcatgaagttgcatgccatacaacgagaggaaaatcggtgggagataaccgcagcagatggcatgaactggggagtttacatacacgcagaggaagtacaggttggcgtgctgacaatgtcatggtcttcggtacttagagtttcggcacttcgctctgttataacctccggctttcgcgccgttagtgtgtttgaggtaccgggaagtgtaaggtccacccttggagctactttaaggcccgatcacgccttatatagtacaactatgcaagccacacccaacgcatcgcatattagtgcttttaaccttcgcatagtttccccgtcggcatatcgtgtttgtcctctccaaaatgacacagatacctacttaggtattccagcagacgtggcggcagttcttccagtagacgtggtgactgatcctaacatcttgctgggcatgcagacaacggtacacattgcggagctagtcaaggcatgtcatccgtcacccgatgttgtgagcgctgtaggggagcacctgaactggctcaacaaactcttactcccacttaaggaatcgactcagttgcaaggaagcgagtcgtacaaggagtgccttgcactcttgggtcgtgttcacgctgcgatgaagatggtgagaattggcttagtagtgccccagctgcaatacagaatgtacggtagcctcatcaaccaaatggcccaagtagcacaaaactacgaccgagaattcaagcaattcaaattattcatcatccaaaatcaaatccttggcagctatttgctgcagcagaacaaggcctttgctgacagagaggtgcagatggagagctttcatgctgctgtcatttctcaaagaaggcaggagttggacgacgccatcgctaagatggaccgactgagcttgcagatggaggaagaggacagagcaatggagcaagcccgaaaagaaatggaagaaggattgaagcagttccagaatgagcaagttgcaagggctgtgttcgctgttcttaaatctgtagctatgattgcgctcgcattcgtcacggctggtgcaacggctcctggagctgtggcgtcggcggggcaagctgtgagcatagcaggtcaggcggcgcaaggtctgcgaagggtggtggaaattctagagcagctggaggctgtgatggaggttgtggctgctgtgaaggacctcgtggattcattggaacaggtaggtcagattgtggacgcaccggtgatgccggaattgccctcagaggcggactggtccatttttgtgaacgaggtggaggccgtggcagagggcatgccaacggaagtctcggaggttccggtgtggagggccaagtgcaagaatgtggctgcactgggtagggagatgtgcatcacggcagaacagatttcccagctccagtatgacatctgggtgcaaggcttgttgcgggatatagctcgaagccaggcagacaggctggccgcaattcaacccgcggaccttaccaactatttggagatggcaatacagatggatatgcggactacgaggatactgatagggctcctcaacataatgcgcatccagaatgcggcacttatgtatgagtaccttctaacgcccacgcagctcactgcatggccgctgagaatggatactgtggccaacttgctcatcacgcacgagagtgctgcactgtcaggattagctcagttagggcccccatcggacttcacgagcaggcatgtagtgaaaggcatacctgtgagcttgcttctagacggtggggattgggaatttgagattcctgtgcaaggtggcatgtccagtttcccttccagctggtctcgcgtccgtattcggcacctggagatgcactttgtgcaggaggcgagcggtggcggcgagattatccaccagcctgccacccagacggggaccatttacatccttctgcagggttccactatcttccatgaccgcagaagagaccaggtgttgccttttcaggccgctgctccgctcaactaccattacgcgtaccgcctcgacaccggcgactccactctcacaaacgaaccctctgaacagtttgccaacaagttcatgcagatgacacccttcacccgttggaggcttcgtctgtctgcgtccgcagcggagaataaaggattagcctttcccacagctacagctcccgactccaccactgagattgccatcactttccatgttacggccattagacaaattgactggcggcaagaggaggag

SEQ ID NO: 493 - DNA, 2602 bp, Artificial Sequence
  Synthetic
atggctctcgtggattacggcaagcttttcgaggatctgaaccagataagcatgggtgtactggatcgggtagagttttcagaggtgatggtgatccacaggatgtatgtgaggctagctgatctgaatgtggggcagctcgagggagccgagaaagtgaagcggttgtatgtgtttgcggacgtggtggagctaccagtcgtggaatggcggtggccgccgcaaataccaggatcggtgacggtgatcatattgtgtcgtcttcttcaatggccaactgatgggaggcagtcggacaccgagctccacctgacattcatgaagttgcatgccatacaacgagaggaaaatcggtgggagataaccgcagcagatggcatgaactggggagtttacatacacgcagaggaagtacaggttggcgtgctgacaatgtcatggtcttcggtacttagagtttcggcacttcgctctgttataacctccggctttcgcgccgttagtgtgtttgaggtaccgggaagtgtaaggtccacccttggagctactttaaggcccgatcacgccttatatagtacaactatgcaagccacacccaacgcatcgcatattagtgcttttaaccttcgcatagtttccccgtcggcatatcgtgtttgtcctctccaaaatgacacagatacctacttaggtattccagcagacgtggcggcagttcttccagtagacgtggtgactgatcctaacatcttgctgggcatgcagacaacggtacacattgcggagctagtcaaggcatgtcatccgtcacccgatgttgtgagcgctgtaggggagcacctgaactggctcaacaaactcttactcccacttaaggaatcgactcagttgcaaggaagcgagtcgtacaaggagtgccttgcactcttgggtcgtgttcacgctgcgatgaagatggtgagaattggcttagtagtgccccagctgcaatacagaatgtacggtagcctcatcaaccaaatggcccaagtagcacaaaactacgaccgagaattcaagcaattcaaattattcatcatccaaaatcaaatccttggcagctatttgctgcagcagaacagggcatttgctgagagggagctgcagatggagagctttcattcagcggtcatttctcaaagaaggcaggagttggacgacgccatcgctaagatggaccgactgagcttgcagatggaggcagagagtagtgcaatggagcaagccaaaaaggaaatggacgaaggattgaggcagttccagaataggcaagttgcaagggctgtgttcgctgttcttaaatctgtagctatgattgcgctcgcattcgtcacggctggtgcaacggctcctggagctgtggcgtcggcggggcaagctgtgagcatagcaggtcaggcggcacaagctctgcgaagggtggtggaaattctagagcagctggaggctgtgatggaggttgtggctgctgtgaaggacctcgtggattcattggaacaggtaggtcagattgtggacgcaccggtgatgccggaattgccctcagaggcggactggtccatttttgtgaacgaggtggaggccgtggcagagggcatgccaacggaagtctcggaggttccggcgtggaaggccaagtgcaagaatgtggctgcactgggtcgggagatgagcatcacggcagtacagatgtcggagctgcagtatgacatctgggtgcaaggcatgatgcgggatatggctcgaagccaggcagacaggctggccgcaattcaacccgcggaccttaccaactatttggagatggctacccagatggatatgcggactacgaggatgctgctggggctcctcaacatattgcgcatccagaatgcggcgctcaggtacgagtatcttctaatgcccacggagctcacaacatggccactgggtatggataccgtgggtgacttgctcatcgcgcaggagaatgctgcactgataggattaatgcagctagggccctcatctgatttcacgagcaggcatgtagtgaaaggcatacctgtgagcttgcttctagacggtggggattgggaatttgagattcctgtgcaaggtggcatgtccagtttcccttccagctggtctcgcgtccgtattcggcacctggagatgcactttgtgcaggaggcgagcggtggcggcgagattatccaccagcctgccacccagacggggaccatttacatccttctgcagggttccactatcttccatgaccgcagaagagaccaggtgttgccttttcaggccgctgctccgctcaactaccattacgcgtaccgcctcgacactggagaagccactcttacgaacgagccctcggaacagtttgccaacacattcatgcagatgacaccgttcactcactggaggcttcgtctgtctgcgtccgcaaaagagaatgcaggattagcctttcccacggctacagcacttgactccactacccagattgtcatcactttccatgttacggccgttagacaaattgactggcggcacgacgaagagtagc

SEQ ID NO: 494 - DNA, 2601 bp, Artificial Sequence
  Synthetic
atggctctcgtggattacggcaagcttttcgaggatctgaaccagataagcatgggtgtactggatcgggtagagttttcagaggtgatggtgatccacaggatgtatgtgaggctagctgatctgaatgtggggcagctcgagggagccgagaaagtgaagcggttgtatgtgtttgcggacgtggtggagctaccagtcgtggaatggcggtggccgccgcaaataccaggatcggtgacggtgatcatattgtgtcgtcttcttcaatggccaactgatgggaggcagtcggacaccgagctccacctgacattcatgaagttgcatgccatacaacgagaggaaaatcggtgggagataaccgcagcagatggcatgaactggggagtttacatacacgcagaggaagtacaggttggcgtgctgacaatgtcatggtcttcggtacttagagtttcggcacttcgctctgttataacctccggctttcgcgccgttagtgtgtttgaggtaccgggaagtgtaaggtccacccttggagctactttaaggcccgatcacgccttatatagtacaactatgcaagccacacccaacgcatcgcatattagtgcttttaaccttcgcatagtttccccgtcggcatatcgtgtttgtcctctccaaaatgacacagatacctacttaggtattccagcagacgtggcggcagttcttccagtagacgtggtgactgatcctaacatcttgctgggcatgcagacaacggtacacattgcggagctagtcaaggcatgtcatccgtcacccgatgttgtgagcgctgtaggggagcacctgaactggctcaacaaactcttactcccacttaaggaatcgactcagttgcaaggaagcgagtcgtacaaggagtgccttgcactcttgggtcgtgttcacgctgcgatgaagatggtgagaattggcttagtagtgccccagctgcaatacagaatgtacggtagcctcatcaaccaaatggcccaagtagcacaaaactacgaccgagaattcaagcaattcaaattattcatcatccaaaatcaaatccttggcagctatttgctgcagcagaacagggcatttgctgacagagaggtgcagatggagagctttcattcagcggtcatttctcaaagaagggaggagttggacaatacattcgcaaagatggaccgattgagcgggcaaatggaggcagagagtagtgcaatggagcaagccaaaaaggaaatggacgaaggattgaggcagttccagaataggcaagttgcgaacgccctctttgccgttcttagcgctgtagctcagattgggcttgcattccttacggctggtgcaacggctcctggagctgtggcgtcggcggggcaagctgtgagcatagcaggtcaggcggcgcaaggtctgcgaagggtggtggaaattctagagcagctggaggctgtgatggaggttgtggctgctgtgaaggacctcgtggattcattggaacaggtaggtcagattgtggacgcaccggtgatgccggaattgccctcagaggcggactggtccatttttgtgaacgaggtggaggccgtggcagagggcatgccaacggaagtctcggaggttccggtgtggagggccaagtgcaagaatgtggctgcactgggtcgggagatgagcatcacggcagtacagatgtcggagctgcagtatgtcatctgggtgcaaggcatgatgcgggatatggctcgaagccaggcagacaggctggccgcaattcaacccgcggaccttaccaactatttggagatggctacccagatggatatgcggactacgaggatgctgctggggctcctcaacatattgcgcatccagaatgcggcacttatgtatgagtaccttctaacgcccacgcagctcactgcatggccgctgagaatggatactgtggccaacttgctcatcacgcacgagagtgctgcactgtcaggattagctcagttagggcccccatcggacttcacgagcaggcatgtagtgaaaggcatacctgtgagcttgcttctagacggtggggattgggaatttgagattcctgtgcaaggtggcatgtccagcttcccttccagctggtctcgcgtccgtattcggcacctggagatgcactttgtgaaggaggcgagcggtattggtggtgagattatccaccagcctgccacccagactgggaccatttacatcctcctgcagggctccactgtcttccatgatcgcagaagagaccaggtgttgccttttcaggccgctgctccgctcaactaccattacgcgtaccgcctcgacaccggcgactccactctcacaaacgaaccctctgaacagtttgccaacacattcatgcagatgacaccgttcactcactggaggctacgtctgtctgcgtccgcagcggagaataaaggattagcctttcccacagctacagctcccgactccaccactgagattgccatcactttccatgttacggccatcagacaaattgactggcggcaagaggaggag

SEQ ID NO: 495 - DNA, 2602 bp, Artificial Sequence
  Synthetic
atggctctcgtggattacggcaagcttttcgaggatctgaaccagataagcatgggtgtactggatcgggtagagttttcagaggtgatggtgatccacaggatgtatgtgaggctagctgatctgaatgtggggcagctcgagggagccgagaaagtgaagcggttgtatgtgtttgcggacgtggtggagctaccagtcgtggaatggcggtggccgccgcaaataccaggatcggtgacggtgatcatattgtgtcgtcttcttcaatggccaactgatgggaggcagtcggacaccgagctccacctgacattcatgaagttgcatgccatacaacgagaggaaaatcggtgggagataaccgcagcagatggcatgaactggggagtttacatacacgcagaggaagtacaggttggcgtgctgacaatgtcatggtcttcggtacttagagtttcggcacttcgctctgttataacctccggctttcgcgccgttagtgtgtttgaggtaccgggaagtgtaaggtccacccttggagctactttaaggcccgatcacgccttatatagtacaactatgcaagccacacccaacgcatcgcatattagtgcttttaaccttcgcatagtttccccgtcggcatatcgtgtttgtcctctccaaaatgacacagatacctacttaggtattccagcagacgtggcggcagttcttccagtagacgtggtgactgatcctaacatcttgctgggcatgcagacaacggtacacattgcggagctagtcaaggcatgtcatccgtcacccgatgttgtgagcgctgtaggggagcacctgaactggctcaacaaactcttactcccacttaaggaatcgactcagttgcaaggaagcgagtcgtacaaggagtgccttgcactcttgggtcgtgttcacgctgcgatgaagatggtgagaattggcttagtagtgccccagctgcaatacagaatgtacggtagcctcatcaaccaaatggcccaagtagcacaaaactacgaccgagaattcaagcaattcaaattattcatcatccaaaatcaaatccttggcagctatttgctgcagcagaacagggcatttgctgagagggagctgcagatggagagctttcatgctgctgtcatttctcaaagaaggcaggagttggacgacgccatcgctaagatggaccgactgagcttgcagatggaggaagaggacagagcaatggagcaagcccgaaaagaaatggaagaaggattgaagcagttccagaatgagcaagttgcaagggctgtgttcgctgttcttaaatctgtagctatgattgcgctcgcattcgtcacggctggtgcaacggctcctggggctgcagcatctgcagcgcaagctgtgagcatagcaggtcaggcggcgcaaggtctgcgaagggtggtggaaattctagaggggctggaggctgtgatggaggttgtggctgctgtgaaggacctcgtggattcattggaacaggtaggtcagattgtggacgcaccggtgatgccggaattgccctcagaggcggactggtccatttttgtgaacgaggtggaggccgtggcagagggcatgccaacggaagtctcggaggttccggtgtggagggccaagtgcaagaatgtggctgcactgggtagggagatgtgcatcacggcagtacagatgtcggagctgcagtatgacatctgggtgcaaggcatgatgcgggatatggctcgaagccaggcagacaggctggccgcaattcaacccgcggaccttaccaactatttggagatggctacccagatggatatgcggactacgaggatgctgctggggctcctcaacatattgcgcatccagaatgcggcgctcaggtacgagtatcttctaatgcccacggagctcacaacatggccactgggtatggataccgtgggtgacttgctcatcgcgcaggagaatgctgcactgataggattaatgcagctagggccctcatctgatttcacgagcaggcatgtagtgaaaggcatacctgtgagcttgcttctagacggtggggattgggaatttgagattcctgtgcaaggtggcatgtccagtttcccttccagctggtctcgagtgcggattcggcacctggagatgcactttgtgcaggaggcgagcggtggcggcgagattatccaccagcctgccacccagacggggaccatttacatcctcctgcagggctccactgtcttccatgatcgcagaagggaggaggtgatgacctttcaggcagcggttccgctcaactaccattacgcgtaccgcctcgacactggagaagccactctcacaaacgaaccctctgaacagtttgccaacacattcatgcagatgacaccgttcactcactggaggctacgtctgtctgcgtccgcaaaagagaatgcaggattagcctttcccacagctacagctcccgactccaccactgagattgccatcactttccatgttacggccattagacaaattgactggcggcacgacgaagagtagc

SEQ ID NO: 496 - DNA, 2598 bp, Artificial Sequence
  Synthetic
atggctctcgtggattacggcaagcttttcgaggatctgaaccagataagcatgggtgtactggatcgggtagagttttcagaggtgatggtgatccacaggatgtatgtgaggctagctgatctgaatgtggggcagctcgagggagccgagaaagtgaagcggttgtatgtgtttgcggacgtggtggagctaccagtcgtggaatggcggtggccgccgcaaataccaggatcggtgacggtgatcatattgtgtcgtcttcttcaatggccaactgatgggaggcagtcggacaccgagctccacctgacattcatgaagttgcatgccatacaacgagaggaaaatcggtgggagataaccgcagcagatggcatgaactggggagtttacatacacgcagaggaagtacaggttggcgtgctgacaatgtcatggtcttcggtacttagagtttcggcacttcgctctgttataacctccggctttcgcgccgttagtgtgtttgaggtaccgggaagtgtaaggtccacccttggagctactttaaggcccgatcacgccttatatagtacaactatgcaagccacacccaacgcatcgcatattagtgcttttaaccttcgcatagtttccccgtcggcatatcgtgtttgtcctctccaaaatgacacagatacctacttaggtattccagcagacgtggcggcagttcttccagtagacgtggtgactgatcctaacatcttgctgggcatgcagacaacggtacacattgcggagctagtcaaggcatgtcatccgtcacccgatgttgtgagcgctgtaggggagcacctgaactggctcaacaaactcttactcccacttaaggaatcgactcagttgcaaggaagcgagtcgtacaaggagtgccttgcactcttgggtcgtgttcacgctgcgatgaagatggtgagaattggcttagtagtgccccagctgcaatacagaatgtacggtagcctcatcaaccaaatggcccaagtagcacaaaactacgaccgagaattcaagcaattcaaattattcatcatccaaaatcaaatccttggcagctatttgctgcagcagaacagggcatttgctgagagggagctgcagatggagagctttcattcagcggtcatttctcaaagaagggaggagttggacaatacattcgcaaagatggaccgattgagcgggcaaatggaggcagagagtagtgcaatggagcaagccaaaaaggaaatggacgaaggattgaggcagttccagaataggcaagttgcgaacgccctctttgccgttcttagcgctgtagctcagattgggcttgcattccttacggctggtgcaacggctcctggagctgtggcgtcggcggggcaagctgtgagcatagcaggtcaggcggcgcaaggtctgcgaagggtggtggaaattctagaggggctcgaggctgtgatggaggttgtggctgctataaagcaccttgtggatgctctggaccaggtaagtcagattgtggatgcaccacctatgccagacatgccctcggaggcggactggtccatttttgtgaacgaggtggaggccgtggcagagggcatgccaacggaagtctcggaggttccggcgtggaaggccaagtgcaagaatgtggctgcactgggtcgggagatgtgcatcacggcagaacagatttcccagctccagtatgacatctgggtgcaaggcttgttgcgggatatagctcaaagccaggcagacaggctggccgcaattcaacccgcggaccttaccaactatttggagatggctacccagatggatatgcggactacgaggatgctgctggggctcctcaacatattgcgcatccagaatgcggcgctcaggtacgagtaccttctaacgcccacgcagctcactgcatggccgctgagaatggatactgtggccaacttgctcatcacgcacgagagtgctgcactgtcaggattagctcagttagggcccccatcggacttcacgagcaggcatgtggtgaaagacatacctgtgaacttgctgctcgatggcgaggattgggagtttgagattcctgtgcaaggtggcatgtccagtttcccttccagctggactcgagtgcggattcggcacctggagatgcactttgtgcaggaggcgagcggtggcggcgagattatccaccagcctgccacccagacggggaccatttacatcctcctgcagggttccactatcttccatgaccgcagaagggaggaggtgatgacctttcaggcagcggttccgctcaactaccattacgcgtaccgcctcgacaccggcgactccactctcacaaacgaaccctctgaacagtttgccaacacattcatgcagatgacacccttcacccgttggaggcttcgtctgtctgcgtccgcaaaagagaatgcaggattagcctttcccacagctacagctcccgactccaccactgagattgccatcactttccatgttacggccatcagacaaattgactggcggcaagaggaggag

SEQ ID NO: 497 - DNA, 2601 bp, Artificial Sequence
  Synthetic
atggctctcgtggattacggcaagcttttcgaggatctgaaccagataagcatgggtgtactggatcgggtagagttttcagaggtgatggtgatccacaggatgtatgtgaggctagctgatctgaatgtggggcagctcgagggagccgagaaagtgaagcggttgtatgtgtttgcggacgtggtggagctaccagtcgtggaatggcggtggccgccgcaaataccaggatcggtgacggtgatcatattgtgtcgtcttcttcaatggccaactgatgggaggcagtcggacaccgagctccacctgacattcatgaagttgcatgccatacaacgagaggaaaatcggtgggagataaccgcagcagatggcatgaactggggagtttacatacacgcagaggaagtacaggttggcgtgctgacaatgtcatggtcttcggtacttagagtttcggcacttcgctctgttataacctccggctttcgcgccgttagtgtgtttgaggtaccgggaagtgtaaggtccacccttggagctactttaaggcccgatcacgccttatatagtacaactatgcaagccacacccaacgcatcgcatattagtgcttttaaccttcgcatagtttccccgtcggcatatcgtgtttgtcctctccaaaatgacacagatacctacttaggtattccagcagacgtggcggcagttcttccagtagacgtggtgactgatcctaacatcttgctgggcatgcagacaacggtacacattgcggagctagtcaaggcatgtcatccgtcacccgatgttgtgagcgctgtaggggagcacctgaactggctcaacaaactcttactcccacttaaggaatcgactcagttgcaaggaagcgagtcgtacaaggagtgccttgcactcttgggtcgtgttcacgctgcgatgaagatggtgagaattggcttagtagtgccccagctgcaatacagaatgtacggtagcctcatcaaccaaatggcccaagtagcacaaaactacgaccgagaattcaagcaattcaaattattcatcatccaaaatcaaatccttggcagctatttgctgcagcagaacagggcatttgctgagagggagctgcagatggagagctttcatgctgctgtcatttctcaaagaagggaggagttggacaatacattcgcaaagatggaccgattgagcgggcaaatggaggaagaggacagagcaatggagcaagccaaaaaggaaatggacgaaggattgaggcagttccagaataggcaagttgcgaacgccctctttgccgttcttagcgctgtagctcagattgggcttgcattccttacggctggtgcaacggctcctggagctgtggtgtcggcggggcaagctgtgagcatagcaggtcaggcggcgcaaggtctgcgaagggtggtggaaattctagagcagctggaggctgtgatggaggttgtggctgctgtgaaggacctcgtggattcattggaacaggtaggtcagattgtggacgcaccggtgatgccggaattgccctcagaggcggactggtccatttttgtgaacgaggtggaggccgtggcagagggcatgccaacggaagtctcggaggttccggcgtggaaggccaagtgcaagaatgtggctgcactgggtagggagatgtgcatcacggcagaacagatttcccagctccagtatgacatctgggtgcaaggcatgatgcgggatatggctcgaagccaggcagacaggctggccgcaattcaacccgcggaccttaccaactatttggagatggctacccagatggatatgcggactacgaggatgctgctggggctcctcaacataatgcgcatccagaatgcggcgctcaggtacgagtatcttctaatgcccacggagctcacaacatggccactgggtatggataccgtgggtgacttgctcatcgcgcaggagaatgctgcactgataggattaatgcagctagggccctcatctgatttcacgagcaggcatgtggtgaaaggcatacctgtgagcttgcttctagacggtggggattgggaatttgagattcctgtgcaaggtggcatgtccagtttcccttccagctggactcgagtgcggattcggcacctggagatgcactttgtgcaggaggccagcggtattggtggtgagattatccaccagcctaccacccagactgggaccgtttacatccttctgcagggttccactatcttccatgaccgcagaagagaccaggtgttgccttttcaggccgctgctccgctcaactaccattacgcgtaccgcctcgacactggagaagccactcttacgaacgagccctcggaacagtttgccaacacattcatgcagatgacacccttcacccgttggaggcttcgtctgtctgcggccgcaaaagagaatgcaggattagcctttcccacggctacagcacttgactccactacccagattgtcatcactttccatgttacggccattagacaaattgactggcggcacgaggaggag

SEQ ID NO: 498 - DNA, 2598 bp, Artificial Sequence
  Synthetic
atggctctcgtggattacggcaagcttttcgaggatctgaaccagataagcatgggtgtactggatcgggtagagttttcagaggtgatggtgatccacaggatgtatgtgaggctagctgatctgaatgtggggcagctcgagggagccgagaaagtgaagcggttgtatgtgtttgcggacgtggtggagctaccagtcgtggaatggcggtggccgccgcaaataccaggatcggtgacggtgatcatattgtgtcgtcttcttcaatggccaactgatgggaggcagtcggacaccgagctccacctgacattcatgaagttgcatgccatacaacgagaggaaaatcggtgggagataaccgcagcagatggcatgaactggggagtttacatacacgcagaggaagtacaggttggcgtgctgacaatgtcatggtcttcggtacttagagtttcggcacttcgctctgttataacctccggctttcgcgccgttagtgtgtttgaggtaccgggaagtgtaaggtccacccttggagctactttaaggcccgatcacgccttatatagtacaactatgcaagccacacccaacgcatcgcatattagtgcttttaaccttcgcatagtttccccgtcggcatatcgtgtttgtcctctccaaaatgacacagatacctacttaggtattccagcagacgtggcggcagttcttccagtagacgtggtgactgatcctaacatcttgctgggcatgcagacaacggtacacattgcggagctagtcaaggcatgtcatccgtcacccgatgttgtgagcgctgtaggggagcacctgaactggctcaacaaactcttactcccacttaaggaatcgactcagttgcaaggaagcgagtcgtacaaggagtgccttgcactcttgggtcgtgttcacgctgcgatgaagatggtgagaattggcttagtagtgccccagctgcaatacagaatgtacggtagcctcatcaaccaaatggcccaagtagcacaaaactacgaccgagaattcaagcaattcaaattattcatcatccaaaatcaaatccttggcagctatttgctgcagcagaacagggcatttgctgagagggagctgcagatggagagctttcatgctgctgtcatttctcaaagaagggaggagttggacaatacattcgcaaagatggaccgattgagcgggcaaatggaggcagagagtagtgcaatggagcaagccaaaaaggaaatggacgaaggattgaggcagttccagaataggcaagttgcgaacgccctctttgccgttcttagcgctgtagctcagattgggcttgcattccttacggctggtgcaacggctcctggggctgtggcgtcggcggggcaagctgtgagcatagcaggtcaggcggcgcaaggtctgcgaagggtggtggaaattctagaggggctcgaggctgtgatggaggttgtggctgctgtgaaggacctcgtggattcattggaacaggtaggtcagattgtggacgcaccggtgatgccggaattgccctcagaggcggactggagtatttttgtgaatgagattgaagccgtggcagaggggatgccgacggaagtctcggaggttccggcgtggagggccaagtgcaagaatgtggctgcactgggtagggagatgagcatcacggcagtacagatgtcggagctgcagtatgacatctgggtgcaaggcatgatgcgggatatggctcgaagccaggcagacaggctggccgcaattcaacccgcggaccttaccaactatttggagatggcaatacagatggatatgcggactacgaggatgctgctggggctcctcaacatattgcgcatccagaatgcggcgctcaggtacgagtatcttctaatgcccacggagctcacaacatggccactgggtatggataccgtgggtgacttgctcatcgcgcaggagaatgctgcactgataggattagctcagttagggcccccatcggacttcacgagcaggcatgtagtgaaaggcatacctgtgagcttgcttctagacggtggggattgggaatttgagattcctgtgcaaggtggcatgtccagcttcccttccagctggtctcgcgtccgtattcggcacctggagatgcactttgtgcaggaggcgagcggtggcggcgagattatccaccagcctgccacccagacggggaccatttacatcctcctgcagggctccactgtcttccatgatcgcagaagagaccaggtgttgccttttcaggccgctgctccgctcaactaccattacgcgtaccgcctcgacactggagaagccactcttacgaacgagccctcggaacagtttgccaacaagttcatgcagatgacacccttcactcactggaggctacgtctgtctgcgtccgcagcggagaataaaggattagcctttcccacagctacagctcccgactccaccactgagattgtcatcactttccatgttacggccattagacaaattgactggcggcaagaggaggag

SEQ ID NO: 499 - DNA, 2598 bp, Artificial Sequence
  Synthetic
atggctctcgtggattacggcaagcttttcgaggatctgaaccagataagcatgggtgtactggatcgggtagagttttcagaggtgatggtgatccacaggatgtatgtgaggctagctgatctgaatgtggggcagctcgagggagccgagaaagtgaagcggttgtatgtgtttgcggacgtggtggagctaccagtcgtggaatggcggtggccgccgcaaataccaggatcggtgacggtgatcatattgtgtcgtcttcttcaatggccaactgatgggaggcagtcggacaccgagctccacctgacattcatgaagttgcatgccatacaacgagaggaaaatcggtgggagataaccgcagcagatggcatgaactggggagtttacatacacgcagaggaagtacaggttggcgtgctgacaatgtcatggtcttcggtacttagagtttcggcacttcgctctgttataacctccggctttcgcgccgttagtgtgtttgaggtaccgggaagtgtaaggtccacccttggagctactttaaggcccgatcacgccttatatagtacaactatgcaagccacacccaacgcatcgcatattagtgcttttaaccttcgcatagtttccccgtcggcatatcgtgtttgtcctctccaaaatgacacagatacctacttaggtattccagcagacgtggcggcagttcttccagtagacgtggtgactgatcctaacatcttgctgggcatgcagacaacggtacacattgcggagctagtcaaggcatgtcatccgtcacccgatgttgtgagcgctgtaggggagcacctgaactggctcaacaaactcttactcccacttaaggaatcgactcagttgcaaggaagcgagtcgtacaaggagtgccttgcactcttgggtcgtgttcacgctgcgatgaagatggtgagaattggcttagtagtgccccagctgcaatacagaatgtacggtagcctcatcaaccaaatggcccaagtagcacaaaactacgaccgagaattcaagcaattcaaattattcatcatccaaaatcaaatccttggcagctatttgctgcagcagaacagggcatttgctgagagggagctgcagatggagagctttcatgctgctgtcatttctcaaagaagggaggagttggacaatacattcgcaaagatggaccgattgagcgggcaaatggaggcagagagtagtgcaatggagcaagccaaaaaggaaatggacgaaggattgaggcagttccagaataggcaagttgcgaacgccctctttgccgttcttagcgctgtagctcagattgggcttgcattccttacggctggtgcaacggctcctggggctgtggcgtcggcggggcaagctgtgagcatagcaggtcaggcggcgcaaggtctgcgaagggtggtggaaattctagaggggctcgaggctgtgatggaggttgtggctgctataaagcaccttgtggatgctctggaacaggtaggtcagattgtggatgcaccacctatgccagacatgccctcggaggcggactggtccatttttgtgaacgaggtggaggccgtggcagaggggatgccgacggaagtctcggaggttccggcgtggaaggccaagtgcaagaatgtggctgcactgggtcgggagatgagcatcacggcagtacagatgtcggagctgcagtatgacatctgggtgcaaggcttgttgcgggatatagctcgaagccaggcagacaggctggccgcaattcaacccgcggaccttaccaactatttggagatggctacccagatggatatgcggactacgaggatgctgctggggctcctcaacatattgcgcatccagaatgcggcgctcaggtacgagtatcttctaatgcccacggagctcacaacatggccactgggtatggataccgtgggtgacttgctcatcacgcacgagagtgctgcactgtcaggattagctcagttagggcccccatctgatttcacgagcaggcatgtggtgaaaggcatacctgtgagcttgcttctagacggtggggattgggaatttgagattcctgtgcaaggtggcatgtccagcttcccttccagctggactcgcgtccgtattcggcacctggagatgcactttgtgcaggaggcgagcggtggcggcgagattatccaccagcctaccacccagactgggaccgtttacatccttctgcagggttccactgtcttccatgaccgcagaagagaccaggtgttgccttttcaggccgctgctccgctcaactaccattacgcgtaccgcctcgacaccggcgactccactctcacaaacgaaccctctgaacagtttgccaacaagttcatgcagatgacacccttcacccgttggaggcttcgtctgtctgcgtccgcaaaagagaatgcaggattagcctttcccacggctacagctcccgactccactacccagattgtcatcactttccatgttacggccattagacaaattgactggcggcaagaggaggag

SEQ ID NO: 500 - DNA, 2598 bp, Artificial Sequence
  Synthetic
atggctctcgtggattacggcaagcttttcgaggatctgaaccagataagcatgggtgtactggatcgggtagagttttcagaggtgatggtgatccacaggatgtatgtgaggctagctgatctgaatgtggggcagctcgagggagccgagaaagtgaagcggttgtatgtgtttgcggacgtggtggagctaccagtcgtggaatggcggtggccgccgcaaataccaggatcggtgacggtgatcatattgtgtcgtcttcttcaatggccaactgatgggaggcagtcggacaccgagctccacctgacattcatgaagttgcatgccatacaacgagaggaaaatcggtgggagataaccgcagcagatggcatgaactggggagtttacatacacgcagaggaagtacaggttggcgtgctgacaatgtcatggtcttcggtacttagagtttcggcacttcgctctgttataacctccggctttcgcgccgttagtgtgtttgaggtaccgggaagtgtaaggtccacccttggagctactttaaggcccgatcacgccttatatagtacaactatgcaagccacacccaacgcatcgcatattagtgcttttaaccttcgcatagtttccccgtcggcatatcgtgtttgtcctctccaaaatgacacagatacctacttaggtattccagcagacgtggcggcagttcttccagtagacgtggtgactgatcctaacatcttgctgggcatgcagacaacggtacacattgcggagctagtcaaggcatgtcatccgtcacccgatgttgtgagcgctgtaggggagcacctgaactggctcaacaaactcttactcccacttaaggaatcgactcagttgcaaggaagcgagtcgtacaaggagtgccttgcactcttgggtcgtgttcacgctgcgatgaagatggtgagaattggcttagtagtgccccagctgcaatacagaatgtacggtagcctcatcaaccaaatggcccaagtagcacaaaactacgaccgagaattcaagcaattcaaattattcatcatccaaaatcaaatccttggcagctatttgctgcagcagaacagggcatttgctgagagggagctgcagatggagagctttcatgctgctgtcatttctcaaagaagggaggagttggacgacgccatcgctaagatggaccgactgagcttgcagatggaggaagaggacagagcaatggagcaagcccgaaaagaaatggaagaaggattgaagcagttccagaatgagcaagttgcaagggctgtgttcgctgttcttaaatctgtagctcagattgggctcgcattcgtcacggctggtgcaacggctcctggagctgtggcgtcggcggggcaagctgtgagcatagcaggtcaggcggcgcaaggtctgcgaagggtggtggaaattctagaggggctcgaggctgtgatggaggttgtggctgctgtgaaggacctcgtggattcattggaacaggtaggtcagattgtggacgcaccggtgatgccggaattgccctcagaggcggactggtccatttttgtgaacgaggtggaggccgtggcagagggcatgccgacggaagtctcggaggttccggcgtggaaggccaagtgcaagaatgtggctgcactgggtcgggagatgagcatcacggcagaacagatgtcggagctgcagtatgacatctgggtgcaaggcatgatgcgggatatggctcgaagccaggcagacaggctggccgcaattcaacccgcggaccttaccaactatttggagatggctacccagatggatatgcggactacgaggatgctgctggggctcctcaacataatgcgcatccagaatgcggcgctcaggtacgagtatcttctaatgcccacggagctcacaacatggccactgggtatggataccgtgggtgacttgctcatcacgcacgagagtgctgcactgtcaggattagctcagttagggcccccatcggacttcacgagcaggcatgtagtgaaaggcatacctgtgagcttgcttctagacggtggggattgggaatttgagattcctgtgcaaggtggcatgtccagcttcccttccagctggtctcgcgtccgtattcggcacctggagatgcactttgtgaaggaggccagcggtggcggcgagattatccaccagcctgccacccagacggggaccatttacatcctcctgcagggttccactatcttccatgaccgcagaagggaggaggtgatgacctttcaggcagcggttccgctcaactaccattacgcgtaccgcctcgacaccggcgactccactctcacaaacgaaccctctgaacagtttgccaacacattcatgcagatgacacccttcacccgttggaggcttcgtctgtctgcgtccgcagcggagaataaaggattagcctttcccacagctacagctcccgactccaccactgagattgtcatcactttccatgttacggccatcagacaaattgactggcggcaagaggaggag

SEQ ID NO: 501 - DNA, 2602 bp, Artificial Sequence
  Synthetic
atggctctcgtggattacggcaagcttttcgaggatctgaaccagataagcatgggtgtactggatcgggtagagttttcagaggtgatggtgatccacaggatgtatgtgaggctagctgatctgaatgtggggcagctcgagggagccgagaaagtgaagcggttgtatgtgtttgcggacgtggtggagctaccagtcgtggaatggcggtggccgccgcaaataccaggatcggtgacggtgatcatattgtgtcgtcttcttcaatggccaactgatgggaggcagtcggacaccgagctccacctgacattcatgaagttgcatgccatacaacgagaggaaaatcggtgggagataaccgcagcagatggcatgaactggggagtttacatacacgcagaggaagtacaggttggcgtgctgacaatgtcatggtcttcggtacttagagtttcggcacttcgctctgttataacctccggctttcgcgccgttagtgtgtttgaggtaccgggaagtgtaaggtccacccttggagctactttaaggcccgatcacgccttatatagtacaactatgcaagccacacccaacgcatcgcatattagtgcttttaaccttcgcatagtttccccgtcggcatatcgtgtttgtcctctccaaaatgacacagatacctacttaggtattccagcagacgtggcggcagttcttccagtagacgtggtgactgatcctaacatcttgctgggcatgcagacaacggtacacattgcggagctagtcaaggcatgtcatccgtcacccgatgttgtgagcgctgtaggggagcacctgaactggctcaacaaactcttactcccacttaaggaatcgactcagttgcaaggaagcgagtcgtacaaggagtgccttgcactcttgggtcgtgttcacgctgcgatgaagatggtgagaattggcttagtagtgccccagctgcaatacagaatgtacggtagcctcatcagacaaatggcccaagtagcacaaaactacgaccgagaattcaagcaattcaaattattcatcatccaaaatcaaatccttggcagctatttgctgcagcagaacagggcatttgctgagagggagctgcagatggagagctttcatgctgctgtcatttctcaaagaaggcaggagttggacgacgccatcgctaagatggaccgactgagcttgcagatggaggaagaggacagagcaatggagcaagcccgaaaggaaatggacgaaggattgaggcagttccagaataggcaagttgcgaacgccctctttgccgttcttagcgctgtagctcagattgggcttgcattccttacggctggtgcaacggctcctggagctgtggcgtcggcggggcaagctgtgagcatagcaggtcaggcggcgcaaggtctgcgaagggtggtggaaattctagagcagctggaggctgtgatggaggttgtggctgctgtgaaggacctcgtggattcattggaacaggtaggtcagattgtggacgcaccggtgatgccggaattgccctcagaggcggactggtccatttttgtgaatgagattgaagccgtggcagaggggatgccaacggaagtctcggaggttccggtgtggagggccaagtgcaagaatgtggctgcactgggtcgggagatgtgcatcacggcagtacagatgtcggagctgcagtatgacatctgggtgcaaggcttgttgcgggatatggctcgaagccaggcagacaggctggccgcaattcaacccgcggaccttaccaactatttggagatggctacccagatggatatgcggactacgaggatgctgctggggctcctcaacatattgcgcatccagaatgcggcgctcaggtacgagtatcttctaatgcccacgcagctcactgcatggccgctgagaatggatactgtggccaacttgctcatcacgcacgagagtgctgcactgtcaggattagctcagttagggcccccatcggacttcacgagcaggcatgtagtgaaaggcatacctgtgagcttgcttctagacggtggggattgggaatttgagattcctgtgcaaggtggcatgtccagtttcccttccagctggactcgagtgcggattcggcacctggagatgcactttgtgcaggaggcgagcggtggcggcgagattatccaccagcctaccacccagactgggaccgtttacatccttctgcagggttccactatcttccatgaccgcagaagagaccaggtgttgccttttcaggccgctgctccgctcaactaccattacgcgtaccgcctcgacaccggcgactccactctcacaaacgaaccctctgaacagtttgccaacaagttcatgcagatgacacccttcacccgttggaggcttcgtctgtctgcgtccgcaaaagagaatgcaggattagcctttcccacggctacagcacttgactccactacccagattgtcatcactttccatgttacggccatcagacaaattgactggcggcacgacgaagagtagc

SEQ ID NO: 502 - DNA, 2601 bp, Artificial Sequence
  Synthetic
atggctctcgtggattacggcaagcttttcgaggatctgaaccagataagcatgggtgtactggatcgggtagagttttcagaggtgatggtgatccacaggatgtatgtgaggctagctgatctgaatgtggggcagctcgagggagccgagaaagtgaagcggttgtatgtgtttgcggacgtggtggagctaccagtcgtggaatggcggtggccgccgcaaataccaggatcggtgacggtgatcatattgtgtcgtcttcttcaatggccaactgatgggaggcagtcggacaccgagctccacctgacattcatgaagttgcatgccatacaacgagaggaaaatcggtgggagataaccgcagcagatggcatgaactggggagtttacatacacgcagaggaagtacaggttggcgtgctgacaatgtcatggtcttcggtacttagagtttcggcacttcgctctgttataacctccgactttcgcgccgttagtgtgtttgaggtaccgggaagtgtaaggtccacccttggagctactttaaggcccgatcacgccttatatagtacaactatgcaagccacacccaacgcatcgcatattagtgcttttaaccttcgcatagtttccccgtcggcatatcgtgtttgtcctctccaaaatgacacagatacctacttaggtattccagcagacgtggcggcagttcttccagtagacgtggtgactgatcctaacatcttgctgggcatgcagacaacggtacacattgcggagctagtcaaggcatgtcatccgtcacccgatgttgtgagcgctgtaggggagcacctgaactggctcaacaaactcttactcccacttaaggaatcgactcagttgcaaggaagcgagtcgtacaaggagtgccttgcactcttgggtcgtgttcacgctgcgatgaagatggtgagaattggcttagtagtgccccagctgcaatacagaatgtacggtagcctcatcaaccaaatggcccaagtagcacaaaactacgaccgagaattcaagcaattcaaattattcatcatccaaaatcaaatccttggcagctatttgctgcagcagaacagggcatttgctgagagggaggtgcagatggagagctttcattcagcggtcatttctcaaagaaggcaggagttggacaatacattcgcaaagatggaccgactgagcttgcagatggaggaagaggacagagcaatggagcaagcccgaaaagaaatggaagaaggattgaagcagttccagaatgagcaagttgcaagggctgtgttcgctgttcttaaatctgtagctatgattgcgctcgcattcgtcacggctggtgcaacggctcctggagctgtggcgtcggcggggcaagctgtgagcatagcaggtcaggcggcacaagctctgcgaagggtggtggaaattctagaggggctcgaggctgtgatggaggttgtggctgctgtgaaggacctcgtggattcattggaacaggtaggtcagattgtggacgcaccggtgatgccggaattgccctcggaggcggactggtccatttttgtgaacgaggtggaggccgtggcagaggggatgccgacggaagtctcggaggtcccggcgtggaaggccaagtgcaagaatgtggctgcactgggtagggagatgtgcatcacggcagtacagatgtcggagctgcagtatgacatctgggtgcaaggcatgatgcgggatatggctcgaagccaggcagacaggctggccgcaattcaacccgcggaccttaccaactatttggagatggctacccagatggatatgcggactacgaggatactgatagggctcctcaacatattgcgcatccagaatgcggcacttatgtatgagtaccttctaacgcccacgcagctcactgcatggccgctgagaatggatactgtggccaacttgctcatcacgcacgagagtgctgcactgtcaggattagctcagttagggcccccatcggacttcacgagcaggcatgtggtgaaagacatacctgtgaacttgctgctcgatggcgaggattgggagtttgagattcctgtgcaagctggcatgtccagcttcccttccagctggactcgagtgcggattcggcacctggagatgcactttgtgaaggaggccagcggtattggtggtgagattatccaccagcctgccacccagactgggaccgtttacatccttctgcagggttccactatcttccatgatcgcagaagggaggaggtgatgacctttcaggcagcggttccgctcaactaccattacgcgtaccgcctcgacactggagaagccactcttacgaacgagccctcggaacagtttgccaacacattcatgcagatgacaccgttcactcactggaggctacgtctgtctgcgtccgcagcggagaataaaggattagcctttcccacggctacagcacttgactccactacccagattgtcatcactttccatgttacggccattagacaaattgactggcggcacgacgaagag

SEQ ID NO: 503 - DNA, 2598 bp, Artificial Sequence
  Synthetic
atggctctcgtggattacggcaagcttttcgaggatctgaaccagataagcatgggtgtactggatcgggtagagttttcagaggtgatggtgatccacaggatgtatgtgaggctagctgatctgaatgtggggcagctcgagggagccgagaaagtgaagcggttgtatgtgtttgcggacgtggtggagctaccagtcgtggaatggcggtggccgccgcaaataccaggatcggtgacggtgatcatattgtgtcgtcttcttcaatggccaactgatgggaggcagtcggacaccgagctccacctgacattcatgaagttgcatgccatacaacgagaggaaaatcggtgggagataaccgcagcagatggcatgaactggggagtttacatacacgcagaggaagtacaggttggcgtgctgacaatgtcatggtcttcggtacttagagtttcggcacttcgctctgttataacctccggctttcgcgccgttagtgtgtttgaggtaccgggaagtgtaaggtccacccttggagctactttaaggcccgatcacgccttatatagtacaactatgcaagccacacccaacgcatcgcatattagtgcttttaaccttcgcatagtttccccgtcggcatatcgtgtttgtcctctccaaaatgacacagatacctacttaggtattccagcagacgtggcggcagttcttccagtagacgtggtgactgatcctaacatcttgctgggcatgcagacaacggtacacattgcggagctagtcaaggcatgtcatccgtcacccgatgttgtgagcgctgtaggggagcacctgaactggctcaacaaactcttactcccacttaaggaatcgactcagttgcaaggaagcgagtcgtacaaggagtgccttgcactcttgggtcgtgttcacgctgcgatgaagatggtgagaattggcttagtagtgccccagctgcaatacagaatgtacggtagcctcatcaaccaaatggcccaagtagcacaaaactacgaccgagaattcaagcaattcaaattattcatcatccaaaatcaaatccttggcagctatttgctgcagcagaacagggcatttgctgagagggagctgcagatggagagctttcatgctgctgtcatttctcaaagaagggaggagttggacaatacattcgcaaagatggaccgattgagcgggcagatggaggaagaggacagagcaatggagcaagcccgaaaagaaatggaagaaggattgaagcagttccagaatgagcaagttgcaagggctgtgttcgctgttcttaaatctgtagctcagattgggcttgcattccttacggctggtgcaacggctcctggagctgtggcgtcggcggggcaagctgtgagcatagcaggtcaggcggcgcaaggtctgcgaagggtggtggaaattctagagcagctggaggctgtgatggaggttgtggctgctgtgaaggacctcgtggattcattggaacaggtaggtcagattgtggacgcaccggtgatgccggaattgccctcagaggcggactggtccatttttgtgaacgaggtggaggccgtggcagagggcatgccaacggaagtctcggaggttccggtgtggaaggccaagtgcaagaatgtggctgcactgggtcgggagatgagcatcacggcagtacagatgtcggagctgcagtatgacatctgggtgcaaggcatgatgcgggatatggctcgaagccaggcagacaggctggccgcaattcaacccgcggaccttaccaactatttggagatggcaatacagatggatatgcggactacgaggatgctgctggggctcctcaacatattgcgcatccagaatgcggcgctcaggtacgagtatcttctaatgcccacggagctcacaacatggccactgggtatggataccgtggccaacttgctcatcacgcacgagagtgctgcactgtcaggattagctcagttagggccctcatctgatttctcgagcaggcatgtagtgaaaggcatacctgtgagcttgcttctagacggtggggattgggagtttgagattcctgtgcaagctggcatgtccagcttcccttccagctggtctcgcgtccgtattcggcacctggagatgcactttgtgaaggaggcgagcggtggcggcgagattatccaccagcctaccacccagacggggaccatttacatcctcctgcagggctccactgtcttccatgatcgcagaagggaggaggtgatgacctttcaggcagcggttccgctcaactaccattacgcgtaccgcctcgacactggagaagccactcttacgaacgagccctcggaacagtttgccaacaagttcatgcagatgacacccttcacccgttggaggcttcgtctgtctgcgtccgcaaaagagaatgcaggattagcctttcccacggctacagcacttgactccactacccagattgtcatcactttccatgttacggccattagacaaattgactggcggcaagaggaggag

SEQ ID NO: 504 - DNA, 2602 bp, Artificial Sequence
  Synthetic
atggctctcgtggattacggcaagcttttcgaggatctgaaccagataagcatgggtgtactggatcgggtagagttttcagaggtgatggtgatccacaggatgtatgtgaggctagctgatctgaatgtggggcagctcgagggagccgagaaagtgaagcggttgtatgtgtttgcggacgtggtggagctaccagtcgtggaatggcggtggccgccgcaaataccaggatcggtgacggtgatcatattgtgtcgtcttcttcaatggccaactgatgggaggcagtcggacaccgagctccacctgacattcatgaagttgcatgccatacaacgagaggaaaatcggtgggagataaccgcagcagatggcatgaactggggagtttacatacacgcagaggaagtacaggttggcgtgctgacaatgtcatggtcttcggtacttagagtttcggcacttcgctctgttataacctccggctttcgcgccgttagtgtgtttgaggtaccgggaagtgtaaggtccacccttggagctactttaaggcccgatcacgccttatatagtacaactatgcaagccacacccaacgcatcgcatattagtgcttttaaccttcgcatagtttccccgtcggcatatcgtgtttgtcctctccaaaatgacacagatacctacttaggtattccagcagacgtggcggcagttcttccagtagacgtggtgactgatcctaacatcttgctgggcatgcagacaacggtacacattgcggagctagtcaaggcatgtcatccgtcacccgatgttgtgagcgctgtaggggagcacctgaactggctcaacaaactcttactcccacttaaggaatcgactcagttgcaaggaagcgagtcgtacaaggagtgccttgcactcttgggtcgtgttcacgctgcgatgaagatggtgagaattggcttagtagtgccccagctgcaatacagaatgtacggtagcctcatcaaccaaatggcccaagtagcacaaaactacgaccgagaattcaagcaattcaaattattcatcatccaaaatcaaatccttggcagctatttgctgcagcagaacaaggcctttgctgacagagaggtgcagatggagagctttcatgctgctgtcatttctcaaagaagggaggagttggacaatacattcgcaaagatggaccgattgagcgggcaaatggaggcagagagtagtgcaatggagcaagccaaaaaggaaatggacgaaggattgaggcagttccagaatgagcaagttgcaagggctgtgttcgctgttcttaaatctgtagctatgattgcgctcgcattcgtcacggctggtgcaacggctcctggagctgtggcgtcggcggggcaagctgtgagcatagcaggtcaggcggcacaaggtctgcgaagggtggtggaaattctagaggggctcgaggctgtgatggaggttgtggctgctgtgaaggacctcgtggattcattggaacaggtaggtcagattgtggatgcaccggtgatgccggaattgccctcagaggcggactggtccatttttgtgaacgaggtggaggccgtggcagagggcatgccgacggaagtctcggaggttccggcgtggagggccaagtgcaagaatgtggctgcactgggtagggagatgtgcatcacggcagtacagatttcccagctccagtatgacatctgggtgcaaggcatgatgcgggatatggctcgaagccaggcagacaggctggccgcaattcaacccgcggaccttaccaactatttggagatggctacccagatggatatgcggactacgaggatgctgctggggctcctcaacatattgcgcatccagaatgcggcgctcaggtacgagtatcttctaatgcccacggagctcacaacatggccactgggtatggataccgtgggtgacttgctcatcgcgcaggagaatgctgcactgataggattaatgcagctagggcccccatcggacttcacgagcaggcatgtggtgaaagacatacctgtgaacttgctgctcgatggcgaggattgggagtttgagattcctgtgcaagctggcatgtccagcttcccttccagctggtctcgcgtccgtattcggcacctggagatgcactttgtgcaggaggcgagcggtggcggcgagattatccaccagcctaccacccagactgggaccgtttacatccttctgcagggttccactatcttccatgaccgcagaagagaccaggtgttgccttttcaggccgctgctccgctcaactaccattacgcgtaccgcctcgacactggagaagccactcttacgaacgagccctcggaacagtttgccaacacattcatgcagatgacaccgttcactcactggaggctacgtctgtctgcgtccgcagcggagaataaaggattagcctttcccacagctacagctcccgactccaccactgagattgccatcactttccatgttacggccatcagacaaattgactggcggcacgacgaagagtagc

SEQ ID NO: 505 - DNA, 2050 bp, Artificial Sequence
  Synthetic
atggattacagcacgctttacagggatctgaaccagataagcatgcccctggatcgggtagagttctcagaggtgatggtgatccacaggatgtatgtgaggctagctgatctgaatgtgggggagctccccggagccgagagggtgaagcggttgtatgtgttggcagacgtggtgactgatcctaacatcttgatgggcatgcaaaccagcgtgcacattgcggagctagtgaaggcatgttacccgtcaccagaattagtgagcgctgtaggggtgcacgtgaattggctcaacgaagtcttgctccgagttgtccagaaggaatctcagttgcaagggaccgaggcctacaacgagtgccttgcgcttttaggtcgcattcaatgtgtcatgaagatggggccgtttgtctcggtagtgccgcagctgcaatacagaatgtatggtagcctcatcagacaaatggcccaggtagcacagaactacgaccaagatttcaggcagctcaagttattcattgcccaaaaccaaatccttggcagctatttgctgcagcagaacaaggcctttgctgacagagaggtgcagatggagagctttcattcagcggtcatttctcaaagaaggcaggagttggacgacgccatcgctaagatggaccgactgagcttgcagatggaggaagaggacagagcaatggagcaagcccgaaaagaaatggaagaaggattgaagcagttccagaatgagcaagttgcaagggctgtgttcgctgttcttaaatctgtagctatgattgcgctcgcattcgtcacggctggtgcaacggctcctggggctgcagcatctgcagcgcaagctgtgagcatagcaggtcaggcggcgcaaggtctgcgaagggtggtggaaattctagagcagctggaggctgtgatggaggttgtggctgctgtgaaggacctcgtggattcattggaacaggtaggtcagattgtggacgcaccggtgatgccggaattgccctcagaggcggactggagtatttttgtgaacgaggtggaggccgtggcagagggcatgccaacggaagtctcggaggttccggtgtggagggccaagtgcaagaatgtggctgcactgggtagggagatgtgcatcacggcagtacagatgtcggagctgcagtatgacatctgggtgcaaggcatgatgcgggatatagctcaaagccacgcagaccggctggcagcgattcaacctgctaatcttaccaactatttggagatggctacccagatggatatgcggactacgaggatgctgctggggctcctcaacatattgcgcatccagaatgcggcgctcaggtacgagtatcttctaatgcccacggagctcacaacatggccactgggtatggataccgtgggtgacttgctcatcgcgcaggagaatgctgcactgataggattaatgcagctagggccctcatctgatttcacgagcaggcatgtagtgaaaggcatacctgtgagcttgcttctagacggtggggattgggaatttgagattcctgtgcaaggtggcatgtccagtttcccttccagctggtctcgcgtccgtattcggcacctggagatgcactttgtgaaggaggccagcggtattggtggtgagattatccaccagcctaccacccagactgggaccgtttacatccttctgcagggctccactgtcttccatgatcgcagaagggaggaggtgatgacctttcaggcagcggttccgctcaactaccattacgcgtaccgcctcgacaccggcgactccactctcacgaacgagccctcggaacagtttgccaacacattcatgcagatgacacccttcacccgttggaggcttcgtctgtctgcgtccgcagcggagaataaaggattagcctttcccacagctacagctcccgactccaccactgagattgccatcactttccatgttacggccattagacaaattgactggcggcacgacgaagagtagc

SEQ ID NO: 506 - DNA, 2569 bp, Artificial Sequence
  Synthetic
atggctctcgtggattacggcaagcttttcgaggatctgaaccagataagcatgggtgtactggatcgggtagagttttcagaggtgatggtgatccacaggatgtatgtgaggctagctgatctgaatgtggggcagctcgagggagccgagaaagtgaagcggttgtatgtgtttgcggacgtggtggagctaccagtcgtggaatggcggtggccgccgcaaataccaggatcggtgacggtgatcattctgtgtcgtcttcttcagtttccaactgatgggtcgttcgctgcttggctcgagctgccgttcatggagttgcacacactcatagaacaatacaggtcagagataaaagcagcagatgacgcgaaatggggaacgtatgtacacgcggaggaagtacagctcagcccgctgtttaatgggtggccttatctggttgttgaggcacagcgctgtattataaccgcggccatgcacaatacatttaaccgccctgggtgggttcgctccattactcaatttacaactgatcagtccggtcgggtagataccacactgctcgcacgaacagaattcggccatattgatctaccactcgaaacagattccccaacggcattcagtgtttcacaccgccaaagtacgaatttgcccgtagagtacaccggtattccagtggaggtggtgaccgatcctaacatcttgatgggcatgcagacaacggtacacattgcggagctagtcaaggcatgtcatccgtcacccgatgttgtgagcgctgtaggggagcacctgaactggctcaacgaagtcttgctccgagttgtccagaaggaatctcagttgcaagggaccgaggcctacaacgagtgccttgcgcttttaggtcgcattcaatgtgtcatgaagatggggccgtttgtctcggtagtgccgcagctgcaatacagaatgtatggtagcctcatcaaccaaatggcccaggtagcacagaactacgaccaagatttcaggcagctcaagttattcattgcccaaaaccaaatccttggcagctatttgctgcagcagaacagggcatttgctgacagagaggtgcagatggagagctttcattcagcggtcatttctcaaagaaggcaggagttggacgacgccatcgctaagatggaccgactgagcttgcagatggaggaagaggacagagcaatggagcaagccaaaaaggaaatggacgaaggattgaggcagttccagaataggcaagttgcgaacgccctctttgccgttcttagcgctgtagctcagattgggcttgcattccttacggctggtgcaacggctcctggagctgtggcgtcggcggggcaagctgtgagcatagcaggtcaggcggcgcaaggtctgcgaagggtggtggaaattctagaggggctcgaggctgtgatggaggttgtggctgctgtgaaggacctcgtggattcattggaacaggtaggtcagattgtggacgcaccggtgatgccggaattgccctcagaggcggactggtccatttttgtgaacgaggtggaggccgtggcagagggcatgccaacggaagtctcggaggttccggtgtggaaggccaagtgcaagaatgtggctgcactgggtcgggagatgagcatcacggcagaacagatgtcggagctgcagtatgacatctgggtgcaaggcttgatgcgggatatggctcgaagccaggcagacaggctggccgcaattcaacccgcggaccttaccaactatttggagatggctacccagatggatatgcggactacgaggatgctgctggggctcctcaacataatgcgcatccagaatgcggcgctcaggtacgagtatcttctaatgcccacggagctcacaacatggccactgggtatggataccgtgggtgacttgctcatcgcgcaggagaatgctgcactgataggattaatgcagctagggcccccatcggacttcacgagcaggcatgtagtgaaaggcatacctgtgagcttgcttctagacggtggggattgggaatttgagattcctgtgcaagctggcatgtccagtttcccttccagctggactcgagtgcggattcggcacctggagatgcactttgtgaaggaggccagcggtattggtggtgagattatccaccagcctaccacccagactgggaccgtttacatccttctgcagggttccactatcttccatgaccgcagaagagaccaggtgttgccttttcaggccgctgctccgctcaactaccattacgcgtaccgcctcgacactggagaagccactcttacgaacgagccctcggaacagtttgccaacacattcatgcagatgacacccttcacccgttggaggcttcgtctgtctgcgtccgcaaaagagaatgcaggattagcctttcccacggctacagcacttgactccactacccagattgtcatcactttccatgttacggccatcagacaaattgactggcggcacgacgaagagtagc

SEQ ID NO: 507 - DNA, 2563 bp, Artificial Sequence
  Synthetic
atggattacagcacgctttacagggatctgaaccagataagcatgcccctggatcgggtagagttctcagaggtgatggtgatccacaggatgtatgtgaggctagctgatctgaatgtggggcagctcgagggagccgagaaagtgaagcggttgtatgtgttggcagacgtggtggagctcgcaacatttgcgcatccacagttgcttaatacgcggatgccaggatcggtgacggtgatcattctgtgtcgtcttcttcagtttccaactgatgggtcgttcgctgcttggctcgagctgccgttcatggagttgcacacactcataggacaatacaggtcagagataaaagcagcagatgacgcgaaatggggaacgtatgtacacgcggaggaagtacagctcagcccgctgtttaatgggtggccttatctggttgttgaggcacagcgctgtattataaccgcggccatgcacaatacatttaaccgccctgggtgggttcgctccattactcaatttacaactgatcagtccggtcgggtagataccacactgctcgcacgaacagaattcggccatattgatctaccactcgaaacagattccccaacggcattcagtgtttcacaccgccaaagtacgaatttgcccgtagagtacaccggtattccagtggaggtggtgaccgatcctaacatcttgatgggcatgcaaaccagcgtgcacattgcggagctagtgaaggcatgttacccgtcacccgatgttgtgagcgctgtaggggtgcacgtgaattggctcaacgaagtcttgctccgagttgtccagaaggaatctcagttgcaagggaccgaggcctacaacgagtgccttgcgcttttaggtcgcattcaatgtgtcatgaagatggggccgtttgtctcggtagtgccgcagctgcaatacagaatgtatggtagcctcatcagacaaatggcccaggtagcacagaactacgaccaagatttcaggcagctcaagttattcattgcccaaaaccaaatccttggcagctatttgctgcagcagaacaaggcctttgctgacagagaggtgcagatggagagctttcatgctgctgtcatttctcaaagaaggcaggagttggacgacgccatcgctaagatggaccgactgagcttgcagatggaggaagaggacagagcaatggagcaagccaaaaaggaaatggacgaaggattgaggcagttccagaataggcaagttgcgaacgccctctttgccgttcttagcgctgtagctcagattgggctcgcattccttacggctggtgcaacggctcctggagctgtggcgtcggcggggcaagctgtgagcatagcaggtcaggcggcgcaaggtctgcgaagggtggtggaaattctagaggggctcgaggctgtgatggaggttgtggctgctgtgaaggacctcgtggattcattggaacaggtaggtcagattgtggacgcaccggtgatgccggaattgccctcagaggcggactggtccatttttgtgaacgaggtggaggccgtggcagagggcatgccaacggaagtctcggaggttccggtgtggagggccaagtgcaagaatgtggctgcactgggtagggagatgtgcatcacggcagaacagatttcccagctccagtatgacatctgggtgcaaggcttgttgcgggatatagctcaaagccacgcagaccggctggcagcgattcaacctgctaatcttaccaactatttggagatggcaatacagatggatatgcggactacgaggatactgatagggctcctcaacataatgcgcatccagaatgcggcacttatgtatgagtaccttctaacgcccacgcagctcactgcatggccgctgagaatggatactgtggccaacttgctcatcacgcacgagagtgctgcactgtcaggattagctcagttagggcccccatcggacttcacgagcaggcatgtagtgaaaggcatacctgtgagcttgcttctagacggtggggattgggaatttgagattcctgtgcaaggtggcatgtccagtttcccttccagctggactcgagtgcggattcggcacctggagatgcactttgtgcaggaggccagcggtattggtggtgagattatccaccagcctaccacccagacggggaccatttacatcctcctgcagggctccactgtcttccatgatcgcagaagggaggaggtgatgacctttcaggcagcggttccgctcaactaccattacgcgtaccgcctcgacaccggcgactccactctcacaaacgagccctcggaacagtttgccaacacattcatgcaggtgacacccttcacccgttggaggcttcgtctgtctgcgtccgcaaaagagaatgcaggattagcctttcccacggctacagcacttgactccactacccagattgtcatcacttttcatgttacggccatcagacaaattgactggcggcacgacgaagagtagc

SEQ ID NO: 508 - DNA, 2569 bp, Artificial Sequence
  Synthetic
atggctctcgtggattacggcaagcttttcgaggatctgaaccagataagcatgcccctggatcgggtagagttctcagaggtgatggtgatccacaggatgtatgtgaggctagctgatctgaatgtggggcagctcgagggagccgagagggtgaagcggttgtatgtgttggcagacgtggtggagctcgcaacatttgcgcatccacagttgcttaatacgcggatgccaggatcggtgacggtgatcattctgtgtcgtcttcttcagtttccaactgatgggtcgttcgctgcttggctcgagctgccgttcatggagttgcacacactcatagaacaatacaggtcagagataaaagcagcagatgacgcgaaatggggaacgtatgtacacgcggaggaagtacagctcagcccgctgtttaatgggtggccttatctggttgttgaggcacagcgctgtattataaccgcggccatgcacaatacatttaaccgccctgggtgggttcgctccattactcaatttacaactgatcagtccggtcgggtagataccacactgctcgcacgaacagaattcggccatattgatctaccactcgaaacagattccccaacggcattcagtgtttcacaccgccaaagtacgaatttgcccgtagagtacaccggtattccagtggaggtggtgaccgatcctaacatcttgatgggcatgcaaaccagcgtgcacattgcggagctagtcaaggcatgttacccgtcaccagaattagtgagcgctgtaggggtgcacgtgaattggctcaacgaagtcttgctccgagttgtccagaaggaatctcagttgcaagggaccgaggcctacaacgagtgccttgcgcttttaggtcgcattcaatgtgtcatgaagatggggccgtttgtctcggtagtgccgcagctgcaatacagaatgtacggtagcctcatcaaccaaatggcccaggtagcacagaactacgaccaagatttcaggcagctcaagttattcattgcccaaaaccaaatccttggcagctatttgctgcagcagaacagggcatttgctgagagggagctgcagatggagagctttcatgctgctgtcatttctcaaagaagggaggagttggacaatacattcgcaaagatggaccgactgagcttgcagatggaggaagaggacagagcaatggagcaagccaaaagggaaatggacgaaggattgaggcagttccagaatgagcaagttgcaagggctgtgttcgctgttcttaaatctgtagctatgattgcgctcgcattcgtcacggctggtgcaacggctcctggagctgtggcgtcggcggggcaagctgtgagcatagcaggtcaggcggcgcaaggtctgcgaagggtggtggaaattctagaggggctcgaggctgtgatggaggttgtggctgctataaagcaccttgtggatgctctggaccaggtaagtcagattgtggacgcaccggtgatgccggaattgccctcagaggcggactggtccatttttgtgaacgaggtggaggccgtggcagagggcatgccaacggaagtctcggaggttccggtgtggagggccaagtgcaagaatgtggctgcactgggtagggagatgtgcatcacggcagaacagatttcccagctccagtatgacatctgggtgcaaggcttgttgcgggatatagctcaaagccacgcagaccggctggccgcaattcaacccgcggaccttaccaactatttggagatggctacccagatggatatgcggactacgaggatgctgctggggctcctcaacatattgcgcatccagaatgcggcgctcaggtacgagtatcttctaatgcccacggagctcacaacatggccactgggtatggataccgtgggtgacttgctcatcacgcacgagagtgctgcactgtcaggattagctcagttagggcccccatcggacttcacgagcaggcatgtggtgaaagacatacctgtgaacttgctgctcgatggcgaggattgggagtttgagattcctgtgcaagctggcatgtccagtttcccttccagctggactcgagtgcggattcggcacctggagatgcactttgtgcaggaggcgagcggtggcggcgagattatccaccagcctaccacccagactgggaccgtttacatccttctgcagggttccactgtcttccatgatcgcagaagggaggaggtgatgacctttcaggcagcggttccgctcaactaccattacgcgtaccgcctcgacaccggcgactccactctcacgaacgagccctcggaacagtttgccaacaagttcatgcagatgacaccgttcactcactggaggctacgtctgtctgcgtccgcagcggagaataaaggattagcctttcccacagctacagctcccgactccaccactgagattgccatcactttccatgttacggccattagacaaattgactggcggcacgacgaagagtagc

SEQ ID NO: 509 - DNA, 2565 bp, Artificial Sequence
  Synthetic
atggctctcgtggattacggcaagcttttcgaggatctgaaccagataagcatgcccctggatcgggtagagttctcagaggagatggtgatccacaggatgtatgtgaggctagctgatctgaatgtggggcagctcgagggagccgagaaagtgaagcggttgtatgtgttggcagacgtggtggagctcgccacatttgcgcatccacagttgcttaatacgcggatgccaggatcggtgacggtgatcattctgtgtcgtcttcttcagtttccaactgatgggtcgttcgctgcttggctcgagctgccgttcatggagttgcacacactcatagaacaatacaggtcagagataaaagcagcagatgacgcgaaatggggaacgtatgtacacgcggaggaagtacagctcagcccgctgtttaatgggtggccttatctggttgttgaggcacagcgctgtattataaccgcggccatgcacaatacatttaaccgccctgggtgggttcgctccattactcaatttacaactgatcagtccggtcgggtagataccacactgctcgcacgaacagaattcggccatattgatctaccactcgaaacagattccccaacggcattcagtgtttcacaccgccaaagtacgaatttgcccgtagagtacaccggtattccagtggaggtggtgaccgatcctaacatcttgatgggcatgcaaaccagcgtgcacattgcggagctagtgaaggcatgttacccgtcaccagaattagtgagcgctgtaggggtgcacgtgaattggctcaacgaagtcttgctccgagttgtccagaaggaatctcagttgcaagggaccgaggcctacaacgagtgccttgcgcttttaggtcgcattcaatgtgtcatgaagatggggccgtttgtctcggtagtgccccagctgcaatacagaatgtacggtagcctcatcagacaaatggcccaggtagcacagaactacgaccgagaattcaagcaattcaaattattcatcatccaaaatcaaatccttggcagctatttgctgcagcagaacagggcatttgctgagagggagctgcagatggagagctttcattcagcggtcatttctcaaagaaggcaggagttggacgacgccatcgctaagatggaccgactgagcttgcagatggaggcagagagtagtgcaatggagcaagccaaaaaggaaatggacgaaggattgaggcagttccagaataggcaagttgcgaacgccctctttgccgttcttagcgctgtagctcagattgggcttgcattccttacggctggtgcaacggctcctggagctgtggcgtcggcggggcaagctgtgagcatagcaggtcaggcggcgcaaggtctgcgaagggtggtggaaattctagagcagctggaggctgtgatggaggttgtggctgctgtgaaggacctcgtggattcattggaacaggtaggtcagattgtggacgcaccggtgatgccggaattgccctcggaggcggactggagtatttttgtgaatgagattgaagccgtggcagaggggatgccgacggaagtctcggaggttccggcgtggaaggccaagtgcaagaatgtggctgcactgggtagggagatgtgcatcacggcagaacagatttcccagctccagtatgacatctgggtgcaaggcttgttgcgggatatagctcaaagccacgcagaccggctggcagcgattcaaccagctaatcttaccaactatttggagatggctatacagatggatatgcggactacgaggatgctgccggggctcctcaacatattgcgcatccagaatgcggcgctcaggtacgagtatcttctaatgcccacggagctcacaacatggccactgggtatggataccgtgggtgacttgctcatcgcgcaggagaatgctgcactgataggattaatgcagctagggccctcatctgatttcacgagcaggcatgtggtgaaaggcatacctgtgagcttgcttctagacggtggggattgggaatttgagattcctgtgcaagctggcatgtccagcttcccttccagctggtctcgcgtccgtattcggcacctggagatgcactttgtgcaggaggcgagcggtggcggcgagattatccaccagcctgccacccagacggggaccatttacatcctcctgcagggctccactgtcttccatgatcgcagaagagaccaggtgttgccttttcaggccgctgctccgcccaactaccattacgcgtaccgcctcgacaccggcgactccactctcacaaacgaaccctctgaacagtttgccaacacattcatgcagatgacaccgttcactcactggaggctacgtctgtctgcgtccgcagcggagaataaaggattagcctttcccacagctacagctcttgactccaccactgagattgccatcactttccatgttacggccatcagacaaattgactggcggcacgacgaggag

SEQ ID NO: 510 - DNA, 2568 bp, Artificial Sequence
  Synthetic
atggctctcgtggattacggcaagcttttcgaggatctgaaccagataagcatgggtgtactggatcgggtagagtcctcagaggtgatggtaatccacaggatgtatgtgaggctagctgatctgaatgtgggggagctccccggagccgagagggtgaagcggttgtatgtgttggcagacgtggtggagctcgcaacatttgcgcatccacagttgcttaatacgcggatgccaggatcggtgacggtgatcattctgtgtcgtcttcttcagtttccaactgatgggtcgttcgctgcttggctcgagctgccgttcatggagttgcacacactcatagaacaatacaggtcagagataaaagcagcagatgacgcgaaatggggaacgtatgtacacgcggaggaagtacagctcagcccgctgtttaatgggtggccttatctggttgttgaggcacagcgctgtattataaccgcggccatgcacaatacatttaaccgccctgggtgggttcgctccattactcaatttacaactgatcagtccggtcgggtagataccacactgctcgcacgaacagaattcggccatattgatctaccactcgaaacagattccccaacggcattcagtgtttcacaccgccaaagtacgaatttgcccgtagagtacaccggtattccagtggaggtggtgaccgatcctaacatcttgatgggcatgcaaaccagcgtgcacattgcggagctagtgaaggcatgttacccgtcaccagaattagtgagcgctgtaggggtgcacgtgaattggctcaacgaagtcttgctccgagttgtccagaaggaatctcagttgcaagggaccgaggcctacaacgagtgccttgcgcttttaggtcgctttcaatgtgtcatgaagatggggccgtttgtctcggtagtgccgcagctgcaatacagaatgtacggtagcctcatcaaccaaatggcccaagtagcacaaaactacgaccaagatttcaggcagctcaagttattcattgcccaaaaccaaatccttggcagctatttgctgcagcagaacagggcatttgctgagagggagctgcagatggagagctttcatgctgctgtcatttctcaaagaaggcaggagttggacgacgccatcgctaagatggaccgactgagcttgcagatggaggcagagagtagtgcaatggagcaagccaaaaaggaaatggacgaaggattgaggcagttccagaataggcaagttgcgaacgccctctttgccgttcttagcgctgtagctcagattgcgctcgcattcgtcacggctggtgcaacggctcctggagctgtggcgtcggcggggcaagctgtgagcatagcaggtcaggcggcgcaaggtctgcgaagggtggtggaaattctggaggggctcgaggctgtgatggaggttgtggctgctataaagcaccttgtggatgctctggaccaggtaagtcagattgtggatgcaccacctatgccagacatgccctcggaggcggactggtccatttttgtgaatgagattgaagccgtggcagagggcatgccaacggaagtctcggaggttccggtgtggagggccaagtgcaagaacgtggctgcactgggcagggagatgtgcatcacggcagtacagatgtcggagctgcagtatgacatctgggtgcaaggcatgatgcgggatatggctcgaagccaggcagacaggctggccgcaattcaacccgcggaccttaccaactatttggagatggcaatacagatggatatgcggactacgaggatgctgctggggctcctcaacatattgcgcatccagaatgcggcgctcaggtacgagtatcttctaatgcccacggagctcacaacatggccactgggtatggataccgtgggtgacttgctcatcgcgcaggagaatgctgcactgataggattaatgcagctagggccctcatctgatttcacgagcaggcatgtggtgaaagacatacctgtgaacttgctgctcgatggcgaggattgggaatttgagattcctgtgcaaggtggcatgtccagtttcccttccagctggactcgagtgcggattcggcacctggagatgcactttgtgcaggaggcgagcggtggcggcgagattatccaccagcctgccacccagacggggaccatttacatccttctgcagggttccactgtcttccatgatcgcagaagggaggaggtgatgacctttcaggcagcggttccgctcaactaccattacgcgtaccgcctcgacactggagaagccactcttacggacgagccctcggaacagtttgccaacaagttcatgcagatgacacccttcacccgttggaggcttcgtctgtctgcgtccgcagcggagaataaaggattagcctttcccacagctacagctcccgactccaccactgagattgccatcactttccatgttacggccattagacaaattgactggcggcaagaggaggag

SEQ ID NO: 511 - DNA, 2559 bp, Artificial Sequence
  Synthetic
atggattacagcacgctttacagggatctgaaccagataagcatgcccctggatcgggtagagttctcagaggtgatggagatccacaggatgtatgtgaggctagctgatctgaatgtggggcagctcgagggagccgagagggtgaagcggttgtatgtgtttgcggacgtggtggagctcgcaacatttgcgcatccacagttgcttaatacgcggatgccaggatcggcgacggtgatcattctgtgtcgtcttcttcagtttccaactgatgggtcgttcgctgcttggctcgagctgccgttcatggagttgcacacactcatagaacaatacaggtcagagataaaagcagcagatgacgcgaaatggggaacgtatgtacacgcggaggaagtacagctcagcccgctgtttaatgggtggccttatctggttgttgaggcacagcgctgtattataaccgcggccatgcacaatacatttaaccgccctgggtgggttcgctccattactcaatttacaactgatcagtccggtcgggtagataccacactgctcgcacgaacagaattcggccatattgatctaccactcgaaacagattccccaacggcattcagtgtttcacaccgccaaagtacgaatttgcccgtagagtacaccggtattccagtggaggtggtgaccgatcctaacatcttgctgggcatgcagacaacggtacacattgcggagctagtcaaggcatgtcatccgtcacccgatgttgtgagcgctgtaggggtgcacgtgaattggctcaacgaagtcttgctccgagttgtccagaaggaatctcagttgcaagggaccgaggcctacaacgagtgccttgcgcttttaggtcgcattcaatgtgtcatgaagatggggccgtttgtctcggtagtgccgcagctgcaatacagaatgtatggtagcctcatcagacaaatggcccaggtagcacagaactacgaccaagatttcaggcagctcaagttattcattgcccaaaaccaaatccttggcagctatttgctgcagcagaacaaggcctttgctgacagagaggtgcagatggagagctttcatgctgctgtcatttctcaaagaagggaggagttggacaatacattcgcaaagatggaccgattgagcgggcagatggaggaagaggacagagcaatggagcaagcccgaaaagaaatggaagaaggattgaggcagttccagaataggcaagttgcgaacgccctctttgccgttcttagcgctgtagctcagattgggcttgcattccttacggctggtgcaacggctcctggggctgtggcgtcggcggggcaagctgtgagcatagcaggtcaggcggcgcaaggtctgcgaagggtggtggaaattctagaggggctcgaggctgtgatggaggttgtggctgctataaagcaccttgtggatgctctggaccaggtaagtcagattgtggatgcaccacctatgccagacatgccctcggaggcggactggagtatttttgtgaatgagattgaagccgtggcagaggggatgccgacggaagtctcggaggttccggtgtggagggccaagtgcaagaatgtggctgcactgggtcgggagatgagcatcacggcagtacagatgtcggagctccagtatgacatctgggtgcaaggcttgttgcgggatatagctcaaagccacgcagaccggctggcagcgattcaaccagctaatcttaccaactatttggagatggctacccagatggatatgcggactacgaggatgctgctggggctcctcaacataatgcgcatccagaatgcggcgctcatgtacgagtaccttctaacgcccacgcagctcactgcatggccgctgagaatggatactgtggccaacttgctcatcacgcacgagagtgctgcactgtcaggattagctcagttagggcccccatcggacttcacgagcaggcatgtagtgaaaggcatacctgtgagcttgcttctagacggtggggattgggaatttgagattcctgtgcaagctggcatgtccagcttcccttccagctggtctcgcgtccgtattcggcacctggagatgcactttgtgaaggaggccagcggtattggtggtgagattatccaccagcctgccacccagacggggaccatttacatcctcctgcagggctccactgtcttccatgatcgcagaagagaccaggtgttgccttttcaggccgctgctccgctcaactaccattacgcgtaccgcctcgacactggagaagccactcttacgaacgagccctcggaacagtttgccaacaagttcatgcagatgacaccgttcacccgttggaggcttcgtctgtctgcgtccgcagcggagaatgaaggattagcctttcccacagctacagctcccgactccaccactgagattgccatcactttccatgttacggccatcagacaaattgactggcggcaagaggaggag

SEQ ID NO: 512 - DNA, 2565 bp, Artificial Sequence
  Synthetic
atggctctcgtggattacggcaagcttttcgaggatctgaaccagataagcatgcccctggatcgggtagagttttcagaggtgatggtgatccacaggatgtatgtgaggctagctgatctgaatgtgggggagctccccggagccgagagggtgaagcggttgtatgtgttggcagacgtggtggagctcgcaacatttgcgcatccacagttgcttaatacgcggatgccaggatcggtgacggtgatcattctgtgtcgtcttcttcagtttccaactgatgggtcgttcgctgcttggctcgagctgccgttcatggagttgcacacactcatagaacaatacaggtcagagataaaagcagcagatgacgcgaaatggggaacgtatgtacacgcggaggaagtacagctcagcccgctgtttaatgggtggccttatctggttgttgaggcacagcgctgtattataaccgcggccatgcacaatacatttaaccgccctgggtgggttcgctccattactcaatttacaactgatcagtccggtcgggtagataccacactgctcgcacgaacagaattcggccatattgatctaccactcgaaacagattccccaacggcattcagtgtttcacaccgccaaagtacgaatttgcccgtagagtacaccggtattccagtggaggtggtgaccgatcctaacatcttgatgggcatgcaaaccagcgtgcacattgcggagctagtgaaggcatgttacccgtcacccgatgttgtgagcgctgtaggggtgcacgtgaattggctcaacgaagtcttgctccgagttgtccagaaggaatctcagttgcaagggaccgaggcctacaacgagtgccttgcgcttttaggtcgcattcaatgtgtcatgaagatggggccgtttgtctcggtagtgccgcagctgcaatacagaatgtatggtagcctcatcagacaaatggcccaggtagcacagaactacgaccaagatttcaggcagctcaagttattcattgcccaaaaccaaatccttggcagctatttgctgcagcagaacagggcatttgctgacagagaggtgcagatggagagctttcatgctgctgtcatttctcaaagaagggaggagttggacaatacattcgcaaagatggaccgactgagcttgcagatggaggaagaggacagagcaatggagcaagcccgaaaagaaatggaagaaggattgaagcagttccagaatgagcaagttgcaagggctgtgttcgctgttcttaaatctgtagctatgattgcgctcgcattcgtcacggctggtgcaacggctcctggagctgtggcgtcggcggggcaagctgtgagcatagcaggtcaggcggcgcaaggtctgcgaagggtggtggaaattctagaggggctcgaggctgtgatggaggttgtggctgctataaagcaccttgtggatgctctggaccaggtaagtcagattgtggatgcaccacctatgccagacatgccctcggaggcggactggagtatttttgtgaatgagattgaagccgtggcagaggggatgccgacggaagtctcggaggttccggtgtggaaggccaagtgcaagaatgtggctgcactgggtagggagatgtgcatcacggcagaacagatttcccagctccagtatgacatctgggtgcaaggcatgatgcgggatatggctcgaagccaggcagacaggctggccgcaattcaacccgcggaccttaccaactatttggagatggctacccagatggatatgcggactacgaggatactgatagggctcctcaacataatgcgcatccagaatgcggcgctcaggtacgagtatcttctaatgcccacggagctcacaacatggccactgggtatggataccgtgggtgacttgctcatcgcgcaggagaatgctgcactgtcaggattagctcagttagggcccccatcggacttcacgagcaggcatgtggtgaaagacatacctgtgagcttgcttctagacggtggggattgggaatttgagattcctgtgcaaggtggcatgtccagtttcccttccagctggactcgagtgcggattcggcacctggagatgcactttgtgcaggaggcgagcggtggcggcgagattatccaccagcctgccacccagacggggaccatttacatccttctgcagggctccactgtcttccatgatcgcagaagggaggaggtgatgacctttcaggcagcggttccgctcaactaccattacgcgtaccgcctcgacaccggcgactccactctcacaaacgaaccctctgaacagtttgccaacacattcatgcagatgacaccgttcactcactggaggctacgtctgtctgcgtccgcaaaagagaatgcaggattagcctttcccacggctacagcacttgactccaccactgagattgtcatcactttccatgttacggccatcagacaaattgactggcggcacgaggaggag

SEQ ID NO: 513 - DNA, 2556 bp, Artificial Sequence
  Synthetic
atggattacagcacgctttacagggatctgaaccagataagcatgcccctggatcgggtagagttctcagaggtgatggtgatccacaggatgtatgtgaggctagctgatctgaatgtggggcagctcgagggagccgagaaagtgaagcggttgtatgtgttggcagacgtggtggagctcgcaacatttgcgcatccacagttgcttaatacgcggatgccaggatcggtgacggtgatcattctgtgtcgtcttcttcagtttccaactgatgggtcgttcgctgcttggctcgagctgccgttcatggagttgcacacactcatagaacaatacaggtcagagataaaagcagcagatgacgcgaaatggggaacgtatgtacacgcggaggaagtacagctcagcccgctgtttaatgggtggccttatctggttgttgaggcacagcgctgtattataaccgcggccatgcacaatacatttaaccgccctgggtgggttcgctccattactcaatttacaactgatcagtccggtcgggtagataccacactgctcgcacgaacagaattcggccatattgatctaccactcgaaacagattccccaacggcattcagtgtttcacaccgccaaagtacgaatttgcccgtagagtacaccggtattccagtggaggtggtgaccgatcctaacatcttgatgggcatgcagacaacggtacacattgcggagctagtcaaggcatgtcatccgtcacccgatgttgtgagcgctgtaggggtgcacctgaactggctcaacgaagtcttgctccgagttgtccagaaggaatctcagttgcaagggaccgaggcctacaacgagtgccttgcgcttttaggtcgcattcaatgtgtcatgaagatggggccgtttgtctcggtagtgccgcagctgcaatacagaatgtatggtagcctcatcagacaaatggcccaggtagcacagaactacgaccaagatttcaggcagctcaagttattcattgcccaaaaccaaatccttggcagctatttgctgcagcagaacagggcatttgctgacagagaggtgcagatggagagctttcattcagcggtcatttctcaaagaagggaggagttggacaatacattcgcaaagatggaccgattgagcgggcaaatggaggcagagagtagtgcaatggagcaagccaaaaaggaaatggaagaaggattgaggcagttccagaataggcaagttgcgaacgccctctttgccgttcttagcgctgtagctcagattgggcttgcattccttacggctggtgcaacggctcctggagctgtggcgtcggcggggcaagctgtgagcatagcaggtcaggcggcgcaaggtctgcgaagggtggtggaaattctagaggggctcgaggctgtgatggaggttgtggctgctgtgaaggacctcgtggattcattggaacaggtaggtcagattgtggacgcaccggtgatgccggaattgccctcagaggcggactggtccatttttgtgaacgaggtggaggccgtggcagagggcatgccaacggaagtctcggaggttccggtgtggaaagccaagtgcaagaatgtggctgcactgggtagggagatgtgcatcacggcagtacagatgtcggagctgcagtatgacatctgggtgcaaggcatgatgcgggatatggctcgaagccaggcagacaggctggccgcaattcaacccgcggaccttaccaactatttggagatggctacccagatggatatgcggactacgaggatactgatagggctcctcaacataatgcgcatccagaatgcggcacttatgtatgagtaccttctaacgcccacgcagctcactgcatggccgctgagaatggatactgtggccaacttgctcatcacgcacgagagtgctgcactgtcaggattagctcagttagggcccccatcggacttcacgagcaggcatgtggtgaaagacatacctgtgaacttgcttctagacggtggggattgggaatttgagattcctgtgcaaggtggcatgtccagtttcccttccagctggactcgcgtccgtattcggcacctggagatgcactttgtgcaggaggcgagcggtggcggcgagattatccaccagcctgccacccagactgggaccgtttacatccttctgcagggttccactatcttccatgatcgcagaagggaggaggtgatgacctttcaggcagcggttccgctcaactaccattacgcgtaccgcctcgacaccggcgactccactctcacaaacgaaccctctgaacagtttgccaacaagttcatgcagatgacacccttcacccgttggaggctacgtctgtctgcgtccgcaaaagagaatgcaggattagcctttcccacggctacagcacttgactccaccactgagattgccatcactttccatgttacggccatcagacaaattgactggcggcaagaggaggag

SEQ ID NO: 514 - DNA, 2560 bp, Artificial Sequence
  Synthetic
atggattacagcacgctttacagggatctgaaccagataagcatgcccctggatcgggtagagttttcagaggtgatggtgatccacaggatgtatgtgaggctagctgatctgaatgtggggcagctcgagggagccgagaaagtgaagcggttgtatgtgttggcagacgtggtggagctcgcaacatttgcgcatccacagttgcttaatacgcggatgccaggatcggtgacggtgatcattctgtgtcgtcttcttcagtttccaactgatgggtcgttcgctgcttggctcgagctgccgttcatggagttgcacacactcatagaacaatacaggtcagagataaaagcagcagatgacgcgaaatggggaacgtatgtacacgcggaggaagtacagctcagcccgctgtttaatgggtggccttatctggttgttgaggcacagcgctgtattataaccgcggccatgcacaatacatttaaccgccctgggtgggttcgctccattactcaatttacaactgatcagtccggtcgggtagataccacactgctcgcacgaacagaattcggccatattgatctaccactcgaaacagattccccaacggcattcagtgtttcacaccgccaaagtacgaatttgcccgtagagtacaccggtattccagtggaggtggtgaccgatcctaacatcttgatgggcatgcagacaacggtacacattgcggagctagtcaaggcatgtcatccgtcacccgatgttgtgagcgctgtaggggtgcacgtgaattggctcaacgaagtcttgctccgagttgtccagaaggaatctcagttgcaagggaccgaggcctacaacgagtgccttgcgcttttaggtcgcattcaatgtgtcatgaagatggggccgtttgtctcggtagtgccgcagctgcaatacagaatgtatggtagcctcatcagacaaatggcccaggtagcacagaactacgaccaagatttcaggcagctcaagttattcattgcccaaaaccaaatccttggcagctatttgctgcagcagaacagggcatttgctgagagggagctgcagatggagagctttcatgctgctgtcatttctcaaagaagggaggagttggacaatacattcgcaaagatggaccgattgagcgggcaaatggaggcagagagtagtgcaatggagcaagccaaaaaggaaatggacgaaggattgaggcagttccagaataggcaagttgcgaacgccctctttgccgttcttagcgctgtagctcagattgggcttgcattccttacggctggtgcaacggctcctggagctgtggcgtcggcggggcaagctgtgagcatagcaggtcaggcggcgcaaggtctgcgaagggtggtggaaattctagaggggctcgaggctgtgatggaggttgtggctgctataaagcaccttgtggatgctctggaccaggtaagtcagattgtggatgcaccacctatgccagacatgccctcagaggcggactggtccatttttgtgaatgagattgaagccgtggcagaggggatgccgacggaagtctcggaggttccggcgtggaaggccaagtgcaagaatgtggctgcactgggtagggagatgtgcatcacggcagaacagatttcccagctccagtatgacatctgggtgcaaggcttgttgcgggatatggctcgaagccaggcagacaggctggccgcaattcaacccgcggaccttaccaactatttggagatggctacccagatggatatgcggactacgaggatgctgctggggctcctcaacataatgcgcatccagaatgcggcgctcatgtatgagtatcttctaatgcccacgcagctcacaacatggccactgggtatggataccgtgggtgacttgctcatcgcgcaggagaatgctgcactgtcaggattagctcagttagggcccccatcggacttcacgagcaggcatgtagtgaaaggcatacctgtgagcttgcttctagacggtggggattgggaatttgagattcctgtgcaaggtggcatgtccagtttcccttccagctggactcgagtgcggattcggcacctggagatgcactttgtgcaggaggcgagcggtggcggcgagattatccaccagcctaccacccagacggggaccatttacatcctcctgcagggctccactgtcttccatgaccgcagaagagaccaggtgttgccttttcaggccgctgctccgctcaactaccattacgcgtaccgcctcgacactggagaagccactctcacaaacgaaccctctgaacagtttgccaacaagttcatgcagatgacacccttcacccgttggaggcttcgtctgtctgcgtccgcaaaagagaatgcaggattagcctttcccacagctacagctcccgactccaccactgagattgccatcactttccatgttacggccattagacaaattgactggcggcaagaggaggagtagc

SEQ ID NO: 515 - DNA, 2556 bp, Artificial Sequence
  Synthetic
atggattacagcacgctttacagggatctgaaccagataagcatgcccctggatcgggtagagttttcagaggtgatggtgatccacaggatgtatgtgaggctagctgatctgaatgtgggggagctccccggagccgagagggtgaagcggttgtatgtgttggcagacgtggtggagctcgcaacatttgcgcatccacagttgcttaatacgcggatgccaggatcggtgacggtgatcattctgtgtcgtcttcttcagtttccaactgatgggtcgttcgctgcttggctcgagctgccgttcttggagttgcacacactcatagaacaatacaggtcagagataaaagcagcagatgacgcgaaatggggaacgtatgtacacgcggaggaagtacagctcagcccgctgtttaatgggtggccttatctggttgttgaggcacagcgctgtattataaccgcggccatgcacaatacatttaaccgccctgggtgggttcgctccattactcaatttacaactgatcagtccggtcgggtagataccacactgctcgcacgaacagaattcggccatattgatctaccactcgaaacagattccccaacggcattcagtgtttcacaccgccaaagtacgaatttgcccgtagagtacaccggtattccagtggaggtggtgaccgatcctaacatcttgatgggcatgcaaaccagcgtgcacattgcggagctagtcaaggcatgtcatccgtcacccgatgttgtgagcgctgtaggggtgcacgtgaattggctcaacgaagtcttgctccgagttgtccagaaggaatctcagttgcaagggaccgaggcctacaacgagtgccttgcgcttttaggtcgcattcaatgtgtcatgaagatggggccgtttgtctcggtagtgccgcagctgcaatacagaatgtatggtagcctcatcagacaaatggcccaagtagcacaaaactacgaccgagaattcaagcaattcaaattattcatcatccaaaatcaaatccttggcagctatttgctgcagcagaacagggcatttgctgacagagaggtgcagatggagagctttcattcagcggtcatttctcaaagaagggaggagttggacaatacattcgcaaagatggaccgattgagcgggcaaatggaggcagagagtagtgcaatggagcaagccaaaaaggaaatggacgaaggattgaggcagttccagaataggcaagttgcgaacgccctctttgccgttcttagcgctgtagctcagattgggcttgcattccttacggctggtgcaacggctcctggagctgtggcgtcggcggggcaagctgtgagcatagcaggtcaggcggcacaagctctgcgaagggtggtggaaattctagaggggctcgaggctgtgatggaggttgtggctgctataaagcaccttgtggattcattggaacaggtaggtcagattgtggacgcaccggtgatgccggaattgccctcagaggcggactggtccatttttgtgaacgaggtggaggccgtggcagagggcatgccaacggaagtctcggaggttccggcgtggaaggccaagtgcaagaatgtggctgcactgggtcgggagatgtgcatcacggcagaacagatgtcggagctgcagtatgacatctgggtgcaaggcttgttgcgggatatggctcgaagccaggcagacaggctggccgcaattcaacccgcggaccttaccaactatttggagatggcaatacagatggatatgcggactacgaggatactgatagggctcctcaacatattgcgcatccagaatgcggcgctcaggtacgagtatcttctaacgcccacggagctcacaacatggccactgggtatggataccgtgggtgacttgctcatcacgcacgagagtgctgcactgtcaggattagctcagttagggcccccatcggacttcacgagcaggcatgtagtgaaaggcatacctgtgagcttgcttctagacggtggggattgggagtttgagattcctgtgcaaggtggcatgtccagtttcccttccagctggactcgagtgcggattcggcacctggagatgcactttgtgaaggaggcgagcggtggcggcgagattatccaccagcctaccacccagacggggaccatttacatcctcctgcagggctccactgtcttccatgatcgcagaagggaggaggtgatgacctttcaggcagcggttccgctcaactaccattacgcgtaccgcctcgacactggagaagccactcttacgaacgagccctcggaacagtttgccaacaagttcatgcagatgacaccgttcacacactggaggctacgtctgtctgcgtccgcagcggagaataaaggattagcctttcccacagctacagctcccgactccaccactgagattgccatcactttccatgttacggccattagacaaattgactggcggcaagaggaggag

SEQ ID NO: 516 - DNA, 2568 bp, Artificial Sequence
  Synthetic
atggctctcgtggattacggcaagcttttcgaggatctgaaccagataagcatgggtgtactggatcgggtagagttttcagaggtgatggtaatccacaggatgtacttgaggttatctgatctgaatgtgggggagctccccggagccgagagggtgaagcggttgtatgtgttggcagacgtggtggagctcgcaacatttgcgcatccacagttgcttaatacgcggatgccaggatcggtgacggtgatcattctgtgtcgtcttcttcagtttccaactgatgggtcgttcgctgcttggctcgagctgccgttcatggagttgcacacactcatagaacaatacaggtcagagataaaagcagcagatgacgcgaaatggggaacgtatgtacacgcggaggaagtacagctcagcccgctgtttaatgggtggccttatctggttgttgaggcacagcgctgtattataaccgcggccatgcacaatacatttaaccgccctgggtgggttcgctccattactcaatttacaactgatcagtccggtcgggtagataccacactgctcgcacgaacagaattcggccatattgatctaccactcgaaacagattccccaacggcattcagtgtttcacaccgccaaagtacgaatttgcccgtagagtacaccggtattccagtggaggtggtgaccgatcctaacatcttgatgggcatgcaaaccagcgtgcacattgcggagctagtgaaggcatgttacccgtcacccgatgttgtgagcgctgtaggggagcacctgaactggctcaacgaagtcttgctccgagttgtccagaaggaatctcagttgcaagggaccgaggcctacaacgagtgccttgcgcttttaggtcgcattcaatgtgtcatgaagatggtgagaattggcttagtagtgccccagctgcaatacagaatgtatggtagcctcatcagacaaatggcccaggtagcacagaactacgaccaagatttcaggcagctcaagttattcattgcccaaaatcaaatccttggcagctatttgctgcagcagaacaaggcatttgctgagagggagctgcagatggagagctttcatgctgctgtcatttctcaaagaagggaggagttggacaatacattcgcaaagatggaccgattgagcgggcaaatggaggcagagagtagtgcaatggagcaagccaaaaaggaaatggacgaaggattgaggcagttccagaatgagcaagttgcaagggctgtgttcgctgttcttaaatctgtagctatgattgcgctcgcattcgtcacggctggtgcaacggctcctggagctgtggcgtcggcggggcaagctgtgaacatagccggtcaagcggcacaagctctgcgaagggtggtggaaattctagaggggctcgaggctgtgatggaggttgtggctgctgtgaaggacctcgtggattcattggaacaggtaggtcagattgtggacgcaccggtgatgccggaattgccctcggaggcggactggagtatttttgtgaatgagattgaagccgtggcagaggggatgccggcggaagtctcggaggttccggcgtggaaggccaagtgcaagaatgtggctgcactgggtagggagatgtgcatcacggcagtacagatgtcggagctgcagtatgacatctgggtgcaaggcatgatgcgggatatggctcgaagccaggcagacaggctggccgcaattcaacccgcggaccttaccaactatttggagatggctacccagatggatatgcggactacgaggatgctgctggggctcctcaacatattgcgcatccagaatgcggcgctcaggtacgagtatcttctaatgcccacggagctcacaacatggccactgggtatggataccgtgggtgacttgctcatcgcgcaggagaatgctgcactgataggattaatgcagctagggccctcatctgatttcacgagcaggcatgtagtgaaaggcatacctgtgagcttgcttctagacggtggggattgggaatttgagattcctgtgcaaggtggcatgtccagcttcccttccagctggtctcgcgtccgtattcggcacctggagatgcactttgtgcaggaggcgagcggtggcggcgagattatccaccagcctgccacccagacggggaccatttacatcctcctgcagggctccactgtcttccatgatcgcagaagggaggaggtgatgacctttcaggcagcggttccgctcaactaccattacgcgtaccgcctcgacactggagaagccactcttacgaacgagccctcggaacagtttgctaacacattcatgcagatgacaccgttcactcactggaggctacgtctgtctgcgtccgcaaaagagaatgcaggattagcctttcccacggctacagcacttgactccactacccagattgtcatcactttccatgttacggccatcagacaaattgactggcggcaagaggaggag

SEQ ID NO: 517 - DNA, 2575 bp, Artificial Sequence
  Synthetic
atggctctcgtggattacggcaagcttttcgaggatctgaaccagataagcatgggtgtactggatcgggtagagttctcagaggtgatggtgatccacaggatgtatgtgaggctagctgatctgaatgtgggggagctccccggagccgagagggtgaagcggttgtatgtgttggcagacgtggtggagctcgcaacatttgcgcatccacagttgcttaatacgcggatgccaggatcggtgacggtgatcattctgtgtcgtcttcttcagtttccaactgatgggtcgttcgctgcttggctcgagctgccgttcatggagttgcacacactcatagaacaatacaggtcagagataaaagcagcagatgacgcgaaatggggaacgtatgtacacgcggaggaagtacagctcagcccgctgtttaatgggtggccttatctggttgttgaggcacagcgctgtattataaccgcggccatgcacaatacatttaaccgccctgggtgggttcgctccattactcaatttacaactgatcagtccggtcgggtagataccacactgctcgcacgaacagaattcggccatattgatctaccactcgaaacagattccccaacggcattcagtgtttcacaccgccaaagtacgaatttgcccgtagagtacaccggtattccagtggaggtggtgaccgatcctaacatcttgatgggcatgcaaaccagcgtgcacattgcggagctagtgaaggcatgttacccgtcaccagaattagtgagcgctgtaggggtgcacgtgaattggctcaacgaagtcttgctccgagttgtccagaaggaatctcagttgcaagggaccgaggcctacaacgagtgccttgcgcttttaggtcgcattcaatgtgtcatgaagatggggccgtttgtctcggtagtgccgcagctgcaatacagaatgtacggtagcctcatcagacaaatggcccaggtagcacagaactacgaccaagatttcaggcagctcaagttattcattgcccaaaaccaaatccttggcagctatttgctgcagcagaacagggcatttgctgagagggagctgcagatggagagctttcatgctgctgtcatttctcaaagaagggaggagttggacaatacattcgcaaagatggaccgattgagcgggcaaatggaggcagagagtagtgcaatggagcaagccaaaagggaaatggacgaaggattgaggcagttccagaataggcaagttgcgaacgccctctttgccgttcttagcgctgtagctcagattgggctcgcattcgtcacggctggtgcaacggctcctggagctgtggcgtcggcggggcaagctgtgagcatagccggtcaggcggcgcaaggtctgcgaagggtggtggaaattctagagcagctggaggctgtgatggaggttgtggctgctgtgaaggacctcgtggattcattggaacaggtaggtcagattgtggacgcaccggtgatgccggaattgccctcagaggcggactggtccatttttgtgaacgaggtggaggccgtggcagagggcatgccaacggaagtctcggaggttccggtgtggagggccaagtgcaagaatgtggctgcactgggtcgggagatgagcatcacggcagtacagatttcccagctccagtatgacatctgggtgcaaggcttgttgcgggatatagctcaaagccacgcagaccggctggcagcgattcaacctgctaatcttaccaactatttggagatggcaatacagatggatatgcggactacgaggatactgatagggctcctcaacataatgcgcatccagaatgcggcacttatgtatgagtaccttctaacgcccacgcagctcactgcatggccgctgagaatggatactgtggccaacttgctcatcacgcacgagagtgctgcactgtcaggattagctcagttagggcccccatcggacttcacgagcaggcatgtggtgaaaggcatacctgtgagcttgcttctagacggtggggattgggaatttgagattcctgtgcaaggtggcatgtccagtttcccttccagctggactcgcgtccgtattcggcacctggagatgcactttgtgcaggaggccagcggtattggtggtgagattatccaccagcctaccacccagacggggaccatttacatcctcctgcagggctccactgtcttccatgatcgcagaagggaggaggtgatgacctttcaggcagcggttccgctcaactaccattacgcgtaccgcctcgacactggagaagccactcttacgaacgagccctcggaacagtttgccaacacattcatgcagatgacaccgttcactcactggaggctacgtctgtctgcgtccgcagcggagaataaaggattagcctttcccacagctacagctcccgactccaccactgagattgccatcactttccatgttacggccattagacaaattgactggcggcacgacgaagagtagc

SEQ ID NO: 518 - protein, 852 aa, Artificial Sequence
  Synthetic
MDYSTLYRDLNQISMPLDRVEFSEVMVIHRMYLRLSDLNVGELPGAERVKRLYVLADVVELATFAHPQLLNTRMPGSVTVIILCRLLQFPTDGSFAAWLELPFMELHTLIEQYRSEIKAADDAKWGTYVHAEEVQLSPLFNGWPYLVVEAQRCIITAAMHNTFNRPGWVRSITQFTTDQSGRVDTTLLARTEFGHIDLPLETDSPTAFSVSHRQSTNLPVEYTGIPVEVVTDPNILMGMQTSVHIAELVKACYPSPELVSAVGVHVNWLNEVLLRVVQKESQLQGTEAYNECLALLGRIQCVMKMGPFVSVVPQLQYRMYGSLINQMAQVAQNYDREFKQFKLFIIQNQILGSYLLQQNRAFAERELQMESFHAAVISQRREELDNTFAKMDRLSGQMEAESSAMEQAKKEMDEGLRQFQNRQVANALFAVLSAVAQIGLAFLTAGATAPGAVASAGQAVSIAGQAAQGLRRVVEILEQLEAVMEVVAAVKDLVDALDQVSQIVDAPPMPDMPSEADWSIFVNEIEAVAEGMPTEVSEVPAWKAKCKNVAALGREMCITAEQISQLQYDIWVQGLLRDMARSQADRLAAIQPANLTNYLEMAIQMDMRTTRILIGLLNIMRIQNAALMYEYLLTPTQLTAWPLRMDTVANLLITHESAALSGLAQLGPPSDFTSRHVVKGIPVSLLLDGGDWEFEIPVQGGMSSFPSSWTRVRIRHLEMHFVQEASGGGEIIHQPATQTGTIYILLQGSTVFHDRRREEVMTFQAAVPLNYHYAYRLDTGEATLTNEPSEQFANTFMQMTPFTHWRLRLSASAAENKGLAFPTATAPDSTTEIAITFHVTAIRQIDWRQEEE

SEQ ID NO: 519 - protein, 853 aa, Artificial Sequence
  Synthetic
MDYSTLYRDLNQISMPLDRVEFSEVMVIHRMYLRLSDLNVGELPGAERVKRLYVLADVVELATFAHPQLLNTRMPGSVTVIILCRLLQFPTDGSFAAWLELPFMELHTLIEQYRSEIKAADDAKWGTYVHAEEVQLSPLFNGWPYLVVEAQRCIITAAMHNTFNRPGWVRSITQFTTDQSGRVDTTLLARTEFGHIDLPLETDSPTAFSVSHRQSTNLPVEYTGIPVEVVTDPNILMGMQTSVHIAELVKACYPSPELVSAVGVHVNWLNEVLLRVVQKESQLQGTEAYNECLALLGRIQCVMKMGPFVSVVPQLQYRMYGSLIRQMAQVAQNYDREFKQFKLFIIQNQILGSYLLQQNRAFAERELQMESFHAAVISQRREELDNTFAKMDRLSGQMEAESSAMEQAKKEMDEGLRQFQNRQVARAVFAVLKSVAMIALAFVTAGATAPGAAASAAQAVNIAGQAAQALRRVVEILEQLEAVMEVVAAIKHLVDALDQVSQIVDAPPMPDMPSEADWSIFVNEIEAVAEGMPTEVSEVPVWRAKCKNVAALGREMSITAVQMSELQYDIWVQGMMRDMARSQADRLAAIQPADLTNYLEMATQMDMRTTRMLLGLLNIMRIQNAALMYEYLLTPTQLTAWPLRMDTVANLLITHESAALSGLAQLGPPSDFTSRHVVKGIPVSLLLDGGDWEFEIPVQGGMSSFPSSWTRVRIRHLEMHFVKEASGIGGEIIHQPATQTGTIYILLQGSTVFHDRRREEVMTFQAAVPLNYHYAYRLDTGEATLTNEPSEQFANTFMQMTPFTHWRLRLSASAAENKGLAFPTATAPDSTTEIAITFHVTAIRQIDWRQEEE

SEQ ID NO: 520 - protein, 853 aa, Artificial Sequence
  Synthetic
MDYSTLYRDLNQISMPLDRVEFSEVMVIHRMYLRLSDLNVGELPGAERVKRLYVLADVVELATFAHPQLLNTRMPGSVTVIILCRLLQFPTDGSFAAWLELPFMELHTLIEQYRSEIKAADDAKWGTYVHAEEVQLSPLFNGWPYLVVEAQRCIITAAMHNTFNRPGWVRSITQFTTDQSGRVDTTLLARTEFGHIDLPLETDSPTAFSVSHRQSTNLPVEYTGIPVEVVTDPNILMGMQTSVQIAELVKACYPSPELVSAVGVHVNWLNEVLLRVVQKESQLQGTEAYNECLALLGRIQCVMKMGPFVSVVPQLQYRMYGSLIRQMAQVAQNYDQDFRQLKLFIAQNQILGSYLLQQNKAFADREVQMESFHSAVISQRRQELDDAIAKMDRLSLQMEEEDRAMEQARKEMEEGLKQFQNEQVARAVFAVLKSVAMIALAFVTAGATAPGAAASAAQAVNIAGQAAQALRRVVEILEGLEAVMEVVAAIKHLVDALDQVSQIVDAPPMPDMPSEADWSIFVNEIEAVAEGMPTEVSEVPAWKAKCKNVAALGREMSITAVQMSELQYDIWVQGLLRDIAQSHADRLAAIQPANLTNYLEMAIQMDMRTTRILIGLLNIMRIQNAALMYEYLLTPTQLTAWPLRMDTVANLLITHESAALSGLAQLGPPSDFTSRHVVKGIPVSLLLDGGDWEFEIPVQGGMSSFPSSWTRVRIRHLEMHFVKEASGIGGEIIHQPTTQTGTVYILLQGSTIFHDRRRDQVLPFQAAAPLNYHYAYRLDTGEATLTNEPSEQFANTFMQMTPFTHWRLRLSASAAENKGLAFPTATAPDSTTEIAITFHVTAIRQIDWRQEEE

SEQ ID NO: 521 - protein, 852 aa, Artificial Sequence
  Synthetic
MDYSTLYRDLNQISMPLDRVEFSEVMVIHRMYLRLSDLNVGELPGAERVKRLYVLADVVELATFAHPQLLNTRMPGSVTVIILCRLLQFPTDGSFAAWLELPFMELHTLIEQYRSEIKAADDAKWGTYVHAEEVQLSPLFNGWPYLVVEAQRCIITAAMHNTFNRPGWVRSITQFTTDQSGRVDTTLLARTEFGHIDLPLETDSPTAFSVSHRQSTNLPVEYTGIPVEVVTDPNILMGMQTSVHIAELVKACYPSPELVSAVGVHVNWLNEVLLRVVQKESQLQGTEAYNECLALLGRIQCVMKMGPFVSVVPQLQYRMYGSLIRQMAQVAQNYDQDFRQLKLFIAQNQILGSYLLQQNKAFADREVQMESFHSAVISQRRQELDDAIAKMDRLSLQMEEEDRAMEQARKEMEEGLKQFQNEQVARAVFAVLKSVAMIALAFVTAGATAPGAAASAAQAVNIAGQAAQALRRVVEILEQLEAVMEVVAAVKDLVDSLEQVGQIVDAPVMPELPSEADWSIFVNEVEAVAEGMPTEVSEVPVWRAKCKNVAALGREMSITAVQMSELQYDIWVQGLLRDIAQSHADRLAAIQPANLTNYLEMAIQMDMRTTRILIGLLNIMRIQNAALMYEYLLTPTQLTAWPLRMDTVANLLITHESAALSGLAQLGPPSDFTSRHVVKGIPVSLLLDGGDWEFEIPVQAGMSSFPSSWTRVRIRHLEMHFVQEASGGGEIIHQPATQTGTIYILLQGSTVFHDRRREEVMTFQAAVPLNYHYAYRLDTGEATLTNEPSEQFANTFMQMTPFTHWRLRLSASAAENKGLAFPTATAPDSTTEIAITFHVTAIRQIDWRQEEE

SEQ ID NO: 522 - protein, 851 aa, Artificial Sequence
  Synthetic
MDYSTLYRDLNQISMPLDRVEFSEVMVIHRMYLRLSDLNVGELPGAERVKRLYVFADVVELATFAHPQLLNTRMPGSVTVIILCRLLQFPTDGSFAAWLELPFMELHTLIEQYRSEIKAADDAKWGTYVHAEEVQLSPLFNGWPYLVVEAQRCIITAAMHNTFNRPGWVRSITQFTTDQSGRVDTTLLARTEFGHIDLPLETDSPTAFSVSHRQSTNLPVEYTGIPVEVVTDPNILMGMQTTVHIAELVKACHPSPDVVSAVGEHLNWLNKLLLPLKESTQLQGSESYKECLALLGRVHAAMKMVRIGLVVPQLQYRMYGSLINQMAQVAQNYDREFKQFKLFIIQNQILGSYLLQQNRAFAERELQMESFHSAVISQRRQELDDAIAKMDRLSLQMEEEDRAMEQARKEMEEGLKQFQNEQVARAVFAVLKSVAMIALAFVTAGATAPGAVASAGQAVSIAGQAAQGLRRVVEILEGLEAVMEVVAAIKHLVDALDQVSQIVDAPPMPDMPSEADWSIFVNEIEAVAEGMPTEVSEVPAWKAKCKNVAALGREMCITAEQISQLQYDIWVQGLLRDIAQSHADRLAAIQPANLTNYLEMAIQMDMRTTRILIGLLNIMRIQNAALMYEYLLTPTQLTAWPLRMDTVANLLITHESAALSGLAQLGPPSDFTSRHVVKGIPVSLLLDGGDWEFEIPVQGGMSSFPSSWTRVRIRHLEMHFVQEASGGGEIIHQPATQTGTIYILLQGSTIFHDRRRDQVLPFQAAAPLNYHYAYRLDTGDSTLTNEPSEQFANKFMQMTPFTRWRLRLSASAAENKGLAFPTATAPDSTTEIAITFHVTAIRQIDWRQEEE

SEQ ID NO: 523 - protein, 853 aa, Artificial Sequence
  Synthetic
MDYSTLYRDLNQISMPLDRVEFSEVMVIHRMYLRLSDLNVGELPGAERVKRLYVLADVVELATFAHPQLLNTRMPGSVTVIILCRLLQFPTDGSFAAWLELPFMELHTLIEQYRSEIKAADDAKWGTYVHAEEVQLSPLFNGWPYLVVEAQRCIITAAMHNTFNRPGWVRSITQFTTDQSGRVDTTLLARTEFGHIDLPLETDSPTAFSVSHRQSTNLPVEYTGIPVEVVTDPNILMGMQTSVHIAELVKACHPSPDVVSAVGVHVNWLNEVLLRVVQKESQLQGTEAYNECLALLGRIQCVMKMGPFVSVVPQLQYRMYGSLIRQMAQVAQNYDQDFRQLKLFIAQNQILGSYLLQQNKAFADREVQMESFHSAVISQRRQELDDAIAKMDRLSLQMEEEDRAMEQARKEMEEGLKQFQNEQVARAVFAVLKSVAMIALAFVTAGATAPGAAASAAQAVNIAGQAAQALRRVVEILEQLEAVMEVVAAVKDLVDSLDQVGQIVDAPVMPELPSEADWSIFVNEVEAVAEGMPTEVSEVPAWKAKCKNVAALGREMCITAEQISQLQYDIWVQGLLRDIAQSHADRLAAIQPANLTNYLEMAIQMDMRTTRILIGLLNIMRIQNAALMYEYLLTPTQLTAWPLRMDTVANLLITHESAALSGLAQLGPPSDFTSRHVVKDIPVNLLLDGEDWEFEIPVQAGMSSFPSSWSRVRIRHLEMHFVKEASGIGGEIIHQPTTQTGTVYILLQGSTIFHDRRRDQVLPFQAAAPLNYHYAYRLDTGDSTLTNEPSEQFANKFMQMTPFTRWRLRLSASAKENAGLAFPTATALDSTTQIVITFHVTAIRQIDWRHDEE

SEQ ID NO: 524 - protein, 853 aa, Artificial Sequence
  Synthetic
MDYSTLYRDLNQISMPLDRVEFSEVMVIHRMYLRLSDLNVGELPGAEKVKRLYVLADVVELATFAHPQLLNTRMPGSVTVIILCRLLQFPTDGSFAAWLELPFMELHTLIEQYRSEIKAADDAKWGTYVHAEEVQLSPLFNGWPYLVVEAQRCIITAAMHNTFNRPGWVRSITQFTTDQSGRVDTTLLARTEFGHIDLPLETDSPTAFSVSHRQSTNLPVEYTGIPVEVVTDPNILMGMQTSVHIAELVKACYPSPELVSAVGVHVNWLNEVLLRVVQKESQLQGTEAYNECLALLGRIQCVMKMGPFVSVVPQLQYRMYGSLIRQMAQVAQNYDQDFRQLKLFIAQNQILGSYLLQQNKAFADREVQMESFHSAVISQRRQELDDAIAKMDRLSLQMEEEDRAMEQAKKEMDEGLRQFQNRQVANALFAVLSAVAQIGLAFLTAGATAPGAVASAGQAVSIAGQAAQGLRRVVEILEQLEAVMEVVAAIKHLVDALDQVSQIVDAPPMPDMPSEADWSIFVNEIEAVAEGMPTEVSEVPAWKAKCKNVAALGREMCITAEQISQLQYDIWVQGLLRDIAQSQADRLAAIQPADLTNYLEMATQMDMRTTRMLLGLLNILRIQNAALRYEYLLMPTELTTWPLGMDTVGDLLIAQENAALIGLMQLGPSSDFTSRHVVKDIPVNLLLDGEDWEFEIPVQAGMSSFPSSWSRVRIRHLEMHFVKEASGIGGEIIHQPTTQTGTVYILLQGSTIFHDRRRDQVLPFQAAAPLNYHYAYRLDTGEATLTNEPSEQFANTFMQMTPFTHWRLRLSASAAENKGLAFPTATAPDSTTEIAITFHVTAIRQIDWRQEEE

SEQ ID NO: 525 - protein, 853 aa, Artificial Sequence
  Synthetic
MDYSTLYRDLNQISMPLDRVEFSEVMVIHRMYVRLADLNVGELPGAEKVKRLYVLADVVELATFAHPQLLNTRMPGSVTVIILCRLLQFPTDGSFAAWLELPFMELHTLIEQYRSEIKAADDAKWGTYVHAEEVQLSPLFNGWPYLVVEAQRCIITAAMHNTFNRPGWVRSITQFTTDQSGRVDTTLLARTEFGHIDLPLETDSPTAFSVSHRQSTNLPVEYTGIPVEVVTDPNILMGMQTSVHIAELVKACYPSPELVSAVGVHVNWLNEVLLRVVQKESQLQGTEAYNECLALLGRIQCVMKMGPFVSVVPQLQYRMYGSLIRQMAQVAQNYDQDFRQLKLFIAQNQILGSYLLQQNKAFADREVQMESFHSAVISQRRQELDDAIAKMDRLSLQMEEEDRAMEQARKEMEEGLKQFQNEQVARAVFAVLKSVAMIALAFVTAGATAPGAAASAAQAVNIAGQAAQALRRVVEILEQLEAVMEVVAAVKDLVDSLEQVGQIVDAPVMPELPSEADWSIFVNEVEAVAEGMPTEVSEVPAWKAKCKNVAALGREMSITAEQISQLQYDIWVQGLLRDIAQSHADRLAAIQPANLTNYLEMAIQMDMRTTRILIGLLNIMRIQNAALMYEYLLTPTQLTAWPLRMDTVANLLITHESAALSGLAQLGPPSDFTSRHVVKGIPVSLLLDGGDWEFEIPVQGGMSSFPSSWTRVRIRHLEMHFVKEASGIGGEIIHQPTTQTGTIYILLQGSTVFHDRRREEVMTFQAAVPLNYHYAYRLDTGDSTLTNEPSEQFANKFMQMTPFTRWRLRLSASAKENAGLAFPTATALDSTTQIVITFHVTAIRQIDWRHDEE

SEQ ID NO: 526 - protein, 852 aa, Artificial Sequence
  Synthetic
MDYSTLYRDLNQISMPLDRVEFSEVMVIHRMYLRLSDLNVGELPGAERVKRLYVLADVVELATFAHPQLLNTRMPGSVTVIILCRLLQFPTDGSFAAWLELPFMELHTLIEQYRSEIKAADDAKWGTYVHAEEVQLSPLFNGWPYLVVEAQRCIITAAMHNTFNRPGWVRSITQFTTDQSGRVDTTLLARTEFGHIDLPLETDSPTAFSVSHRQSTNLPVEYTGIPVEVVTDPNILLGMQTSVHIAELVKACYPSPELVSAVGVHVNWLNKLLLPLKESTQLQGSESYKECLALLGRVHAAMKMVRIGLVVPQLQYRMYGSLINQMAQVAQNYDREFKQLKLFIAQNQILGSYLLQQNRAFAERELQMESFHSAVISQRRQELDDAIAKMDRLSLQMEEEDRAMEQARKEMEEGLKQFQNEQVARAVFAVLKSVAMIALAFVTAGATAPGAAASAAQAVNIAGQAAQALRRVVEILEGLEAVMEVVAAIKHLVDALDQVSQIVDAPPMPDMPSEADWSIFVNEIEAVAEGMPTEVSEVPAWKAKCKNVAALGREMCITAEQISQLQYDIWVQGLLRDIAQSHADRLAAIQPANLTNYLEMAIQMDMRTTRILIGLLNIMRIQNAALMYEYLLTPTQLTAWPLRMDTVANLLITHESAALSGLAQLGPPSDFTSRHVVKGIPVSLLLDGGDWEFEIPVQGGMSSFPSSWTRVRIRHLEMHFVQEASGIGGEIIHQPATQTGTIYILLQGSTVFHDRRREEVMTFQAAVPLNYHYAYRLDTGEATLTNEPSEQFANTFMQMTPFTHWRLRLSASAAENKGLAFPTATAPDSTTEIAITFHVTAIRQIDWRQEEE

SEQ ID NO: 527 - protein, 834 aa, Artificial Sequence
  Synthetic
MDYSTLYRDLNQISMPLDRVEFSEVMVIHRMYLRLSDLNVGELPGAERVKRLYVLADVVELATFAHPQLLNTRMPGSVTVIILCRLLQFPTDGSFAAWLELPFMELHTLIEQYRSEIKAADDAKWGTYVHAEEVQLSPLFNGWPYLVVEAQRCIITAAMHNTFNRPGWVRSITQFTTDQSGRVDTTLLARTEFGHIDLPLETDSPTAFSVSHRQSTNLPVEYTGIPVEVVTDPNILMGMQTSVHIAELVKACYPSPELVSAVGVHVNWLNEVLLRVVQKESQLQGTEAYNECLALLGRIQCVMKMGPFVSVVPQLQYRMYGSLIRQMAQVAQNYDQDFRQLKLFIAQNQILGSYLLQQNKAFADREVQMESFHSAVISQRRQELDDAIAKMDRLSLQMEEEDRAMEQARKEMEEGLKQFQNEQVARAMFTACAADAAAQAVSIAGQAAQGLRRVVEILEQLEAVMEVVAAIKHLVDALDQVSQIVDAPVMPELPSEADWSIFVNEVEAVAEGMPTEVSEVPVWRAKCKNVAALGREMCITAEQISQLQYDIWVQGLLRDIAQSHADRLAAIQPANLTNYLEMAIQMDMRTTRILIGLLNIMRIQNAALMYEYLLTPTELTTWPLGMDTVGDLLIAQENAALIGLMQLGPSSDFTSRHVVKDIPVNLLLDGEDWEFEIPVQAGMSSFPSSWSRVRIRHLEMHFVKEASGIGGEIIHQPTTQTGTVYILLQGSTIFHDRRRDQVLPFQAAAPLNYHYAYRLDTGEATLTNEPSEQFANTFMQMTPFTHWRLRLSASAAENKGLAFPTATAPDSTTEIAITFHVTAIRQIDWRQEEE

SEQ ID NO: 528 - protein, 853 aa, Artificial Sequence
  Synthetic
MDYSTLYRDLNQISMPLDRVEFSEVMVIHRMYLRLSDLNVGELPGAERVKRLYVLADVVELATFAHPQLLNTRMPGSVTVIILCRLLQFPTDGSFAAWLELPFMELHTLIEQYRSEIKAADDAKWGTYVHAEEVQLSPLFNGWPYLVVEAQRCIITAAMHNTFNRPGWVRSITQFTTDQSGRVDTTLLARTEFGHIDLPLETDSPTAFSVSHRQSTNLPVEYTGIPVEVVTDPNILMGMQTSVHIAELVKACYPSPELVSAVGVHVNWLNEVLLRVVQKESQLQGTEAYNECLALLGRIQCVMKMVRIGLVVPQLQYRMYGSLINQMAQVAQNYDREFKQFKLFIIQNQILGSYLLQQNRAFAERELQMESFHAAVISQRREELDNTFAKMDRLSGQMEAESSAMEQAKKEMDEGLRQFQNRQVANALFAVLSAVAQIGLAFLTAGATAPGAVASAGQAVSIAGQAAQGLRRVVEILEQLEAVMEVVAAVKDLVDSLEQVGQIVDAPVMPELPSEADWSIFVNEIEAVAEGMPTEVSEVPAWKAKCKNVAALGREMCITAEQISQLQYDIWVQGLLRDIAQSHADRLAAIQPANLTNYLEMAIQMDMRTTRILIGLLNIMRIQNAALMYEYLLTPTELTTWPLGMDTVGDLLIAQENAALIGLMQLGPSSDFTSRHVVKDIPVNLLLDGEDWEFEIPVQAGMSSFPSSWSRVRIRHLEMHFVKEASGIGGEIIHQPTTQTGTVYILLQGSTIFHDRRRDQVLPFQAAAPLNYHYAYRLDTGDSTLTNEPSEQFANKFMQMTPFTRWRLRLSASAKENAGLAFPTATALDSTTQIVITFHVTAIRQIDWRHDEE

SEQ ID NO: 529 - protein, 853 aa, Artificial Sequence
  Synthetic
MDYSTLYRDLNQISMPLDRVEFSEVMVIHRMYLRLSDLNVGELPGAEKVKRLYVLADVVELATFAHPQLLNTRMPGSVTVIILCRLLQFPTDGSFAAWLELPFMELHTLIEQYRSEIKAADDAKWGTYVHAEEVQLSPLFNGWPYLVVEAQRCIITAAMHNTFNRPGWVRSITQFTTDQSGRVDTTLLARTEFGHIDLPLETDSPTAFSVSHRQSTNLPVEYTGIPVEVVTDPNILMGMQTSVHIAELVKACYPSPELVSAVGVHVNWLNEVLLRVVQKESQLQGTEAYNECLALLGRIQCVMKMGPFVSVVPQLQYRMYGSLIRQMAQVAQNYDQDFRQLKLFIAQNQILGSYLLQQNRAFAERELQMESFHAAVISQRREELDNTFAKMDRLSGQMEAESSAMEQAKKEMDEGLRQFQNRQVANALFAVLSAVAQIGLAFLTAGATAPGAVASAGQAVSIAGQAAQGLRRVVEILEQLEAVMEVVAAVKDLVDSLEQVGQIVDAPVMPELPSEADWSIFVNEVEAVAEGMPTEVSEVPVWRAKCKNVAALGREMCITAEQISQLQYDIWVQGLLRDIAQSHADRLAAIQPADLTNYLEMATQMDMRTTRMLLGLLNILRIQNAALRYEYLLMPTELTTWPLGMDTVGDLLIAQENAALIGLMQLGPSSDFTSRHVVKDIPVNLLLDGEDWEFEIPVQAGMSSFPSSWSRVRIRHLEMHFVKEASGIGGEIIHQPTTQTGTVYILLQGSTIFHDRRRDQVLPFQAAAPLNYHYAYRLDTGDSTLTNEPSEQFANKFMQMTPFTRWRLRLSASAAENKGLAFPTATAPDSTTEIAITFHVTAIRQIDWRQEEE

SEQ ID NO: 530 - protein, 853 aa, Artificial Sequence
  Synthetic
MDYSTLYRDLNQISMPLDRVEFSEVMVIHRMYLRLSDLNVGELPGAERVKRLYVLADVVELATFAHPQLLNTRMPGSVTVIILCRLLQFPTDGSFAAWLELPFMELHTLIEQYRSEIKAADDAKWGTYVHAEEVQLSPLFNGWPYLVVEAQRCIITAAMHNTFNRPGWVRSITQFTTDQSGRVDTTLLARTEFGHIDLPLETDSPTAFSVSHRQSTNLPVEYTGIPVEVVTDPNILMGMQTSVHIAELVKACYPSPELVSAVGEHVNWLNEVLLRVVQKESQLQGTEAYNECLALLGRIQCVMKMGPFVSVVPQLQYRMYGSLINQMAQVAQNYDREFKQFKLFIIQNQILGSYLLQQNRAFAERELQMESFHAAVISQRREELDNTFAKMDRLSGQMEAESSAMEQAKKEMDEGLRQFQNRQVANALFAVLSAVAQIGLAFLTAGATAPGAVASAGQAVSIAGQAAQGLRRVVEILEGLEAVMEVVAAVKDLVDSLEQVGQIVDAPVMPELPSEADWSIFVNEVEAVAEGMPTEVSEVPVWRAKCKNVAALGREMCITAEQISQLQYDIWVQGLLRDIAQSHADRLAAIQPANLTNYLEMATQMDMRTTRMLLGLLNILRIQNAALRYEYLLMPTELTTWPLGMDTVGDLLIAQENAALIGLMQLGPSSDFTSRHVVKDIPVNLLLDGEDWEFEIPVQAGMSSFPSSWSRVRIRHLEMHFVKEASGIGGEIIHQPTTQTGTVYILLQGSTIFHDRRRDQVLPFQAAAPLNYHYAYRLDTGDSTLTNEPSEQFANKFMQMTPFTRWRLRLSASAKENAGLAFPTATALDSTTQIVITFHVTAIRQIDWRHDEE

SEQ ID NO: 531 - protein, 853 aa, Artificial Sequence
  Synthetic
MDYSTLYRDLNQISMPLDRVEFSEVMVIHRMYLRLSDLNVGELPGAERVKRLYVLADVVELATFAHPQLLNTRMPGSVTVIILCRLLQFPTDGSFAAWLELPFMELHTLIEQYRSEIKAADDAKWGTYVHAEEVQLSPLFNGWPYLVVEAQRCIITAAMHNTFNRPGWVRSITQFTTDQSGRVDTTLLARTEFGHIDLPLETDSPTAFSVSHRQSTNLPVEYTGIPVEVVTDPNILMGMQTSVHIAELVKACYPSPELVSAVGVHVNWLNEVLLRVVQKESQLQGTEAYNECLALLGRIQCVMKMGPFVSVVPQLQYRMYGSLIRQMAQVAQNYDQDFRQLKLFIAQNQILGSYLLQQNKAFADREVQMESFHSAVISQRRQELDDAIAKMDRLSLQMEEEDRAMEQARKEMEEGLKQFQNEQVARAVFAVLKSVAMIALAFVTAGATAPGAAASAAQAVNIAGQAAQALRRVVEILEGLEAVMEVVAAVKDLVDSLEQVGQIVDAPVMPELPSEADWSIFVNEVEAVAEGMPTEVSEVPVWKAKCKNVAALGREMSITAVQMSELQYDIWVQGMMRDMARSQADRLAAIQPADLTNYLEMATQMDMRTTRMLLGLLNILRIQNAALRYEYLLMPTELTTWPLGMDTVGDLLIAQENAALIGLMQLGPSSDFTSRHVVKDIPVNLLLDGEDWEFEIPVQAGMSSFPSSWSRVRIRHLEMHFVKEASGIGGEIIHQPTTQTGTVYILLQGSTIFHDRRRDQVLPFQAAAPLNYHYAYRLDTGEATLTNEPSEQFANTFMQMTPFTHWRLRLSASAAENKGLAFPTATAPDSTTEIAITFHVTAIRQIDWRQEEE

SEQ ID NO: 532 - protein, 853 aa, Artificial Sequence
  Synthetic
MDYSTLYRDLNQISMPLDRVEFSEVMVIHRMYLRLSDLNVGQLEGAERVKRLYVFADVVELATFAHPQLLNTRMPGSVTVIILCRLLQFPTDGSFAAWLELPFMELHTLIEQYRSEIKAADDAKWGTYVHAEEVQLSPLFNGWPYLVVEAQRCIITAAMHNTFNRPGWVRSITQFTTDQSGRVDTTLLARTEFGHIDLPLETDSPTAFSVSHRQSTNLPVEYTGIPVEVVTDPNILMGMQTSVHIAELVKACYPSPELVSAVGVHVNWLNEVLLRVVQKESQLQGTEAYNECLALLGRIQCVMKMGPFVSVVPQLQYRMYGSLINQMAQVAQNYDREFKQFKLFIIQNQILGSYLLQQNRAFADREVQMESFHSAVISQRRQELDDAIAKMDRLSLQMEEEDRAMEQARKEMEEGLKQFQNEQVARAVFAVLSAVAQIGLAFLTAGATAPGAVASAGQAVSIAGQAAQGLRRVVEILEGLEAVMEVVAAIKHLVDALDQVSQIVDAPPMPDMPSEADWSIFVNEIEAVAEGMPTEVSEVPAWKAKCKNVAALGREMCITAEQISQLQYDIWVQGLLRDIAQSHADRLAAIQPANLTNYLEMAIQMDMRTTRILIGLLNIMRIQNAALMYEYLLTPTQLTAWPLRMDTVANLLITHESAALSGLAQLGPPSDFTSRHVVKGIPVSLLLDGGDWEFEIPVQAGMSSFPSSWSRVRIRHLEMHFVKEASGIGGEIIHQPATQTGTVYILLQGSTIFHDRRRDQVLPFQAAAPLNYHYAYRLDTGDSTLTNEPSEQFANKFMQMTPFTRWRLRLSASAKENAGLAFPTATALDSTTQIVITFHVTAIRQIDWRHDEE

SEQ ID NO: 533 - protein, 852 aa, Artificial Sequence
  Synthetic
MDYSTLYRDLNQISMPLDRVEFSEVMVIHRMYLRLSDLNVGELPGAERVKRLYVLADVVELATFAHPQLLNTRMPGSVTVIILCRLLQFPTDGSFAAWLELPFMELHTLIEQYRSEITAADDAKWGTYVHAEEVQLSPLFNGWPYLVVEAQRCIITAAMHNTFNRPGWVRSITQFTTDQSGRVDTTLLARTEFGHIDLPLETDSPTAFSVSHRQSTNLPVEYTGIPVEVVTDPNILMGMQTSVHIAELVKACYPSPELVSAVGEHVNWLNEVLLRVVQKESQLQGTEAYNECLALLGRIQCVMKMGPFVSVVPQLQYRMYGSLIRQMAQVAQNYDQDFRQLKLFIAQNQILGSYLLQQNKAFADREVQMESFHSAVISQRRQELDDAIAKMDRLSLQMEEEDRAMEQARKEMEEGLKQFQNEQVARAVFAVLKSVAMIALAFVTAGATAPGAAASAAQAVNIAGQAAQALRRVVEILEGLEAVMEVVAAIKHLVDALDQVSQIVDAPPMPDMPSEADWSIFVNEIEAVAEGMPTEVSEVPVWRAKCKNVAALGREMSITAVQMSELQYDIWVQGMMRDMARSQADRLAAIQPADLTNYLEMATQMDMRTTRMLLGLLNIMRIQNAALMYEYLLTPTQLTAWPLRMDTVANLLITHESAALSGLAQLGPPSDFTSRHVVKGIPVSLLLDGGDWEFEIPVQGGMSSFPSSWTRVRIRHLEMHFVQEASGGGEIIHQPATQTGTIYILLQGSTVFHDRRREEVMTFQAAVPLNYHYAYRLDTGEATLTNEPSEQFANTFMQMTPFTHWRLRLSASAAENKGLAFPTATAPDSTTEIAITFHVTAIRQIDWRQEEE

SEQ ID NO: 534 - protein, 852 aa, Artificial Sequence; identical to SEQ ID NO: 521
  Synthetic

SEQ ID NO: 535 - protein, 852 aa, Artificial Sequence
  Synthetic
MDYSTLYRDLNQISMPLDRVEFSEVMVIHRMYLRLSDLNVGELPGAERVKRLYVFADVVELATFAHPQLLNTRMPGSVTVIILCRLLQFPTDGSFAAWLELPFMELHTLIEQYRSEIKAADDAKWGTYVHAEEVQLSPLFNGWPYLVVEAQRCIITAAMHNTFNRPGWVRSITQFTTDQSGRVDTTLLARTEFGHIDLPLETDSPTAFSVSHRQSTNLPVEYTGIPVEVVTDPNILMGMQTSVHIAELVKACYPSPELVSAVGVHVNWLNEVLLRVVQKESQLQGTEAYNECLALLGRIQCVMKMGPFVSVVPQLQYRMYGSLIRQMAQVAQNYDQDFRQLKLFIAQNQILGSYLLQQNKAFADREVQMESFHSAVISQRRQELDDAIAKMDRLSLQMEEEDRAMEQARKEMEEGLKQFQNEQVARAVFAVLKSVAMIALAFVTAGATAPGAAASAAQAVNIAGQAAQALRRVVEILEGLEAVMEVVAAIKHLVDALDQVSQIVDAPPMPDMPSEADWSIFVNEIEAVAEGMPTEVSEVPAWKAKCKNVAALGREMSITAVQMSELQYDIWVQGMMRDMARSQADRLAAIQPADLTNYLEMATQMDMRTTRMLLGLLNIMRIQNAALMYEYLLTPTQLTAWPLRMDTVANLLITHESAALSGLAQLGPPSDFTSRHVVKGIPVSLLLDGGDWEFEIPVQGGMSSFPSSWTRVRIRHLEMHFVQEASGGGEIIHQPATQTGTIYILLQGSTVFHDRRREEVMTFQAAVPLNYHYAYRLDTGEATLTNEPSEQFANKFMQMTPFTRWRLRLSASAKENVGLAFPTATALDSTTEIAITFHVTAIRQIDWRQEEE

SEQ ID NO: 536 - protein, 853 aa, Artificial Sequence
  Synthetic
MDYSTLYRDLNQISMPLDRVEFSEVMVIHRMYLRLSDLNVGELPGAERVKRLYVLADVVELATFAHPQLLNTRMPGSVTVIILCRLLQFPTDGSFAAWLELPFMELHTLIEQYRSEIKAADDAKWGTYVHAEEVQLSPLFNGWPYLVVEAQRCIITAAMHNTFNRPGWVRSITQFTTDQSGRVDTTLLARTEFGHIDLPLETDSPTAFSVSHRQSTNLPVEYTGIPVEVVTDPNILMGMQTSVHIAELVKACYPSPELVSAVGEHLNWLNEVLLRVVQKESQLQGTEAYNECLALLGRIQCVMKMGPFVSVVPQLQYRMYGSLIRQMAQVAQNYDQDFRQLKLFIAQNQILGSYLLQQNKAFADREVQMESFHSAVISQRRQELDDAIAKMDRLSLQMEEEDRAMEQARKEMEEGLKQFQNEQVARAVFAVLKSVAMIALAFVTAGATAPGAAASAAQAVNIAGQAAQALRRVVEILEGLEAVMEVVAAVKDLVDSLEQVGQIVDAPVMPELPSEADWSIFVNEVEAVAEGMPTEVSEVPVWRAKCKNVAALGREMSITAVQMSELQYDIWVQGMMRDMARSQADRLAAIQPADLTNYLEMATQMDMRTTRMLLGLLNILRIQNAALRYEYLLMPTELTTWPLGMDTVGDLLIAQENAALIGLMQLGPSSDFTSRHVVKDIPVNLLLDGEDWEFEIPVQAGMSSFPSSWSRVRIRHLEMHFVKEASGIGGEIIHQPTTQTGTIYILLQGSTVFHDRRREEVMTFQAAVPLNYHYAYRLDTGEATLTNEPSEQFANTFMQMTPFTHWRLRLSASAAENKGLAFPTATAPDSTTEIAITFHVTAIRQIDWRQEEE

SEQ ID NO: 537 - protein, 852 aa, Artificial Sequence
  Synthetic
MDYSTLYRDLNQISMPLDRVEFSEVMVIHRMYLRLSDLNVGELPGAERVKRLYVLADVVELATFAHPQLLNTRMPGSVTVIILCRLLQFPTDGSFAAWLELPFMELHTLIEQYRSEIKAADDAKWGTYVHAEEVQLSPLFNGWPYLVVEAQRCIITAAMHNTFNRPGWVRSITQFTTDQSGRVDTTLLARTEFGHIDLPLETDSPTAFSVSHRQSTNLPVEYTGIPVEVVTDPNILMGMQTSVHIAELVKACYPSPELVSAVGVHVNWLNEVLLRVVQKESQLQGTEAYNECLALLGRIQCVMKMGPFVSVVPQLQYRMYGSLIRQMAQVAQNYDQDFRQLKLFIAQNQILGSYLLQQNKAFADREVQMESFHSAVISQRRQELDDAIAKMDRLSLQMEEEDRAMEQARKEMEEGLKQFQNRQVANALFAVLSAVAQIGLAFLTAGATAPGAAASAAQAVNIAGQAAQGLRRVVEILEQLEAVMEVVAAVKDLVDSLEQVGQIVDAPVMPELPSEADWSIFVNEVEAVAEGMPTEVSEVPVWRAKCKNVAALGREMCITAEQISQLQYDIWVQGLLRDIAQSHADRLAAIQPANLTNYLEMAIQMDMRTTRILIGLLNIMRIQNAALMYEYLLTPTQLTAWPLRMDTVANLLITHESAALSGLAQLGPPSDFTSRHVVKGIPVSLLLDGGDWEFEIPVQGGMSSFPSSWTRVRIRHLEMHFVQEASGGGEIIHQPATQTGTIYILLQGSTVFHDRRREEVMTFQAAVPLNYHYAYRLDTGEATLTNEPSEQFANTFMQMTPFTHWRLRLSASAAENKGLAFPTATAPDSTTEIAITFHVTAIRQIDWRHDEE

SEQ ID NO: 538 - protein, 853 aa, Artificial Sequence
  Synthetic
MDYSTLYRDLNQISMPLDRVEFSEVMVIHRMYLRLSDLNVGELPGAERVKRLYVLADVVELATFAHPQLLNTRMPGSVTVIILCRLLQFPTDGSFAAWLELPFMELHTLIEQYRSEIKAADDAKWGTYVHAEEVQLSPLFNGWPYLVVEAQRCIITAAMHNTFNRPGWVRSITQFTTDQSGRVDTTLLARTEFGHIDLPLETDSPTAFSVSHRQSTNLPVEYTGIPVEVVTDPNILMGMQTSVHIAELVKACYPSPELVSAVGVHVNWLNEVLLRVVQKESQLQGTEAYNECLALLGRIQCVMKMGPFVSVVPQLQYRMYGSLIRQMAQVAQNYDQDFRQLKLFIAQNQILGSYLLQQNRAFADREVQMESFHSAVISQRRQELDDAIAKMDRLSLQMEEEDRAMEQARKEMEEGLKQFQNEQVARAVFAVLKSVAMIALAFVTAGATAPGAAASAAQAVSIAGQAAQGLRRVVEILEQLEAVMEVVAAVKDLVDSLEQVGQIVDAPVMPELPSEADWSIFVNEVEAVAEGMPTEVSEVPVWRAKCKNVAALGREMSITAVQMSELQYDIWVQGLLRDIAQSHADRLAAIQPANLTNYLEMAIQMDMRTTRILIGLLNIMRIQNAALMYEYLLTPTQLTAWPLRMDTVANLLITHESAALSGLAQLGPSSDFTSRHVVKDIPVNLLLDGEDWEFEIPVQAGMSSFPSSWSRVRIRHLEMHFVKEASGIGGEIIHQPTTQTGTVYILLQGSTIFHDRRRDQVLPFQAAAPLNYHYAYRLDTGDSTLTNEPSEQFANKFMQMTPFTRWRLRLSASAKENAGLAFPTATALDSTTQIVITFHVTAIRQIDWRHDEE

SEQ ID NO: 539 - protein, 852 aa, Artificial Sequence
  Synthetic
MDYSTLYRDLNQISMPLDRVEFSEVMVIHRMYLRLSDLNVGELPGAERVKRLYVLADVVELATFAHPQLLNTRMPGSVTVIILCRLLQFPTDGSFAAWLELPFMELHTLIEQYRSEIKAADDAKWGTYVHAEEVQLSPLFNGWPYLVVEAQRCIITAAMHNTFNRPGWVRSITQFTTDQSGRVDTTLLARTEFGHIDLPLETDSPTAFSVSHRQSTNLPVEYTGIPVEVVTDPNILMGMQTSVHIAELVKACYPSPELVSAVGVHVNWLNEVLLRVVQKESQLQGTEAYNECLALLGRIQCVMKMGPFVSVVPQLQYRMYGSLIRQMAQVAQNYDQDFRQLKLFIAQNQILGSYLLQQNKAFADREVQMESFHSAVISQRRQELDDAIAKMDRLSLQMEEEDRAMEQARKEMEEGLKQFQNEQVARAVFAVLKSVAMIALAFVTAGATAPGAAASAAQAVNIAGQAAQGLRRVVEILEQLEAVMEVVAAVKDLVDSLEQVGQIVDAPVMPELPSEADWSIFVNEIEAVAEGMPTEVSEVPVWRAKCKNVAALGREMCITAEQISQLQYDIWVQGLLRDIAQSHADRLAAIQPANLTNYLEMAIQMDMRTTRILIGLLNIMRIQNAALMYEYLLTPTQLTAWPLRMDTVANLLITHESAALSGLAQLGPPSDFTSRHVVKGIPVSLLLDGGDWEFEIPVQGGMSSFPSSWTRVRIRHLEMHFVQEASGGGEIIHQPATQTGTIYILLQGSTVFHDRRREEVMTFQAAVPLNYHYAYRLDTGDSTLTNEPSEQFANKFMQMTPFTHWRLRLSASAAENKGLAFPTATAPDSTTEIAITFHVTAIRQIDWRQEEE

SEQ ID NO: 540 - protein, 852 aa, Artificial Sequence
  Synthetic
MDYSTLYRDLNQISMPLDRVEFSEVMVIHRMYLRLSDLNVGQLEGAEKVKRLYVLADVVELATFAHPQLLNTRMPGSVTVIILCRLLQWPTDGSFAAWLELPFMELHTLIEQYRSEIKAADDAKWGTYVHAEEVQLSPLFNGWPYLVVEAQRCIITAAMHNTFNRPGWVRSITQFTTDQSGRVDTTLLARTEFGHIDLPLETDSPTAFSVSHRQSTNLPVEYTGIPVEVVTDPNILMGMQTSVHIAELVKACYPSPELVSAVGVHVNWLNEVLLRVVQKESQLQGTEAYNECLALLGRIQCVMKMVRIGLVVPQLQYRMYGSLINQMAQVAQNYDREFKQFKLFIIQNQILGSYLLQQNRAFADREVQMESFHSAVISQRRQELDDAIAKMDRLSLQMEEEDRAMEQARKEMEEGLKQFQNEQVARAVFAVLKSVAMIALAFVTAGATAPGAAASAAQAVNIAGQAAQALRRVVEILEGLEAVMEVVAAIKHLVDALDQVSQIVDAPPMPDMPSEAGWSIFVNEVEAVAEGMPTEVSEVPVWRAKCKNVAALGREMSITAVQMSELQYDIWVQGMMRDMARSQADRLAAIQPADLTNYLEMATQMDMRTTRMLLGLLNILRIQNAALMYEYLLTPTQLTAWPLRMDTVANLLITHESAALSGLAQLGPPSDFTSRHVVKGIPVSLLLDGGDWEFEIPVQGGMSSFPSSWTRVRIRHLEMHFVQEASGGGEIIHQPATQTGTIYILLQGSTVFHDRRREEVMTFQAAVPLNYHYAYRLDTGEATLTNEPSEQFANTFMQMTPFTHWRLRLSASAAENKGLAFPTATAPDSTTEIAITFHVTAIRQIDWRQEEE

SEQ ID NO: 541 - protein, 853 aa, Artificial Sequence
  Synthetic
MDYSTLYRDLNQISMPLDRVEFSEVMVIHRMYLRLSDLNVGELPGAERVKRLYVLADVVELATFAHPQLLNTRMPGSVTVIILCRLLQFPTDGSFAAWLELPFMELHTLIEQYRSEIKAADDAKWGTYVHAEEVQLSPLFNGWPYLVVEAQRCIITAAMHNTFNRPGWVRSITQFTTDQSGRVDTTLLARTEFGHIDLPLETDSPTAFSVSHRQSTNLPVEYTGIPVEVVTDPNILMGMQTSVHIAELVKACYPSPELVSAVGVHVNWLNEVLLRVVQKESQLQGTEAYNECLALLGRIQCVMKMGPFVSVVPQLQYRMYGSLIRQMAQVAQNYDQDFRQLKLFIAQNQILGSYLLQQNKAFADREVQMESFHSAVISQRREELDNTFAKMDRLSGQMEAESSAMEQAKKEMDEGLRQFQNRQVANALFAVLSAVAQIGLAFLTAGATAPGAVASAGQAVSIAGQAAQGLRRVVEILEQLEAVMEVVAAVKDLVDSLEQVGQIVDAPVMPELPSEADWSIFVNEVEAVAEGMPTEVSEVPVWRAKCKNVAALGREMSITAVQMSELQYDIWVQGLLRDIAQSHADRLAAIQPANLTNYLEMAIQMDMRTTRMLLGLLNILRIQNAALRYEYLLMPTELTTWPLGMDTVGDLLIAQENAALIGLMQLGPSSDFTSRHVVKDIPVNLLLDGEDWEFEIPVQAGMSSFPSSWSRVRIRHLEMHFVKEASGIGGEIIHRPATQTGTIYILLQGSTVFHDRRREEVMTFQAAVPLNYHYAYRLDTGEATLTNEPSEQFANTFMQMTPFTHWRLRLSASAAENKGLAFPTATAPDSTTEIAITFHVTAIRQIDWRQEEE

SEQ ID NO: 542 - protein, 865 aa, Artificial Sequence
  Synthetic
MDYSTLYRDLNQISMPLDRVEFSEVMVIHRMYLRLSDLNVGELPGAERVKRLYVLADVVELATFAHPQLLNTRMPGSVTVIILCRLLQWPTDGRQSDTELHLTFMKLHAIQREENRWEITAADGMNWGVYIHAEEVQVGVLTMSWSSVLRVSALRSVITSGFRAVSVFEVPGSVRSTLGATLRPDHALYSTTMQATPNASHISAFNLRIVSPSAYRVCPLQNDTDTYLGIPADVAAVLPVDVVTDPNILLGMQTTVHIAELVKACHPSPDVVSAVGEHLNWLNKLLLPLKESTQLQGSESYKECLALLGRVHAAMKMVRIGLVVPQLQYRMYGSLINQMAQVAQNYDREFKQFKLFIIQNQILGSYLLQQNRAFAERELQMESFHAAVISQRREELDNTFAKMDRLSLQMEEEDRAMEQARKEMEEGLKQFQNEQVARAVFAVLKSVAMIALAFVTAGATAPGAAASAAQAVNIAGQAAQALRRVVEILEGLEAVMEVVAAIKHLVDALDQVSQIVDAPPMPDMPSEADWSIFVNEIEAVAEGMPTEVSEVPAWKAKCKNVAALGREMSITAVQMSELQYDIWVQGMMRDMARSQADRLAAIQPADLTNYLEMATQMDMRTTRMLLGLLNILRIQNAALRYEYLLMPTELTTWPLGMDTVGDLLIAQENAALIGLMQLGPSSDFTSRHVVKDIPVNLLLDGEDWEFEIPVQAGMSSFPSSWSRVRIRHLEMHFVKEASGIGGEIIHQPTTQTGTVYILLQGSTIFHDRRRDQVLPFQAAAPLNYHYAYRLDTGDSTLTNEPSEQFANKFMQMTPFTRWRLRLSASAKENAGLAFPTATALDSTTQIVITFHVTAIRQIDWRHDEE

SEQ ID NO: 543 - protein, 866 aa, Artificial Sequence
  Synthetic
MALVDYGKLFEDLNQISMGVLDRVEFSEVMVIHRMYVRLADLNVGQLEGAEKVKRLYVFADVVELPVVEWRWPPQIPGSVTVIILCRLLQWPTDGRQSDTELHLTFMKLHAIQREENRWEITAADGMNWGVYIHAEEVQVGVLTMSWSSVLRVSALRSVITSGFRAVSVFEVPGSVRSTLGATLRPDHALYSTTMQATPNASHISAFNLRIVSPSAYRVCPLQNDTDTYLGIPADVAAVLPVDVVTDPNILLGMQTTVHIAELVKACHPSPDVVSAVGEHLNWLNKLLLPLKESTQLQGSESYKECLALLGRVHAAMKMVRIGLVVPQLQYRMYGSLIRQMAQVAQNYDQDFRQLKLFIAQNQILGSYLLQQNKAFADREVQMESFHSAVISQRREELDDAIAKMDRLSLQMEEEDRAMEQARKEMEEGLKQFQNEQVARAVFAVLKSVAMIALAFVTAGATAPGAAASAAQAVNIAGQAAQALRRVVEILEGLEAVMEVVAAIKHLVDALDQVSQIVDAPPMPDMPSEADWSIFVNEIEAVAEGMPTEVSEVPAWKAKCKNVAALGREMSITAVQMSELQYDIWVQGMMRDMARSQADRLAAIQPADLTNYLEMAIQMDMRTTRMLLGLLNILRIQNAALRYEYLLMPTELTTWPLGMDTVGDLLIAQENAALIGLMQLGPPSDFTSRHVVKGIPVSLLLDGGDWEFEIPVQGGMSSFPSSWTRVRIRHLEMHFVQEASGGGEIIHQPTTQTGTVYILLQGSTIFHDRRRDQVLPFQAAAPLNYHYAYRLDTGDSTLTNEPSEQFANKFMQMTPFTRWRLRLSASAAENKGLAFPTATAPDSTTEIAITFHVTAIRQIDWRQEEE

SEQ ID NO: 544 - protein, 851 aa, Artificial Sequence; identical to SEQ ID NO: 522
  Synthetic

SEQ ID NO: 545 - protein, 853 aa, Artificial Sequence; identical to SEQ ID NO: 532
  Synthetic

SEQ ID NO: 546 - protein, 852 aa, Artificial Sequence
  Synthetic
MDYSTLYRDLNQISMPLDRVEFSEVMVIHRMYLRLSDLNVGELPGAERVKRLYVLADVVELATFAHPQLLNTRMPGSVTVIILCRLLQFPTDGSFAAWLELPFMELHTLIEQYRSEIKAADDAKWGTYVHAEEVQLSPLFNGWPYLVVEAQRCIITAAMHNTFNRPGWVRSITQFTTDQSGRVDTTLLARTEFGHIDLPLETDSPTAFSVSHRQSTNLPVEYTGIPVEVVTDPNILMGMQTSVHIAELVKACYPSPELVSAVGVHVNWLNEVLLRVVQKESQLQGTEAYNECLALLGRIQCVMKMGPFVSVVPQLQYRMYGSLIRQMAQVAQNYDQDFRQLKLFIAQNQILGSYLLQQNKAFADREVQMESFHSAVISQRRQELDDAIAKMDRLSLQMEEEDRAMEQARKEMEEGLKQFQNEQVARAVFAVLKSVAMIALAFVTAGATAPGAVASAGQAVSIAGQAAQGLRRVVEILEQLEAVMEVVAAVKDLVDSLEQVGQIVDAPVMPELPSEADWSIFVNEVEAVAEGMPTEVSEVPVWRAKCKNVAALGREMCITAEQISQLQYDIWVQGLLRDIAQSHADRLAAIQPANLTNYLEMAIQMDMRTTRILIGLLNIMRIQNAALMYEYLLTPTQLTAWPLRMDTVANLLITHESAALSGLAQLGPPSDFTSRHVVKGIPVSLLLDGGDWEFEIPVQGGMSSFPSSWTRVRIRHLEMHFVQEASGGGEIIHQPATQTGTVYILLQGSTIFHDRRRDQVLPFQAAAPLNYHYAYRLDTGDSTLTNEPSEQFANKFMQMTPFTRWRLRLSASAKENAGLAFPTATALDSTTQIVITFHVTAIRQIDWRHDEE

SEQ ID NO: 547 - protein, 852 aa, Artificial Sequence
  Synthetic
MDYSTLYRDLNQISMPLDRVEFSEVMVIHRMYVRLADLNVGQLPGAERVKRLYVLADVVELATFAHPQLLNTRMPGSVTVIILCRLLQFPTDGSFAAWLELPFMELHTLIEQYRSEIKAADDAKWGTYVHAEEVQLSPLFNGWPYLVVEAQRCIITAAMHNTFNRPGWVRSITQFTTDQSGRVDTTLLARTEFGHIDLPLETDSPTAFSVSHRQSTNLPVEYTGIPVEVVTDPNILMGMQTSVHIAELVKACHPSPDVVSAVGVHVNWLNEVLLRVVQKESQLQGTEAYNECLALLGRIQCVMKMGPFVSVVPQLQYRMYGSLINQMAQVAQNYDREFKQFKLFIIQNQILGSYLLQQNRAFAERELQMESFHAAVISQRREELDNTFAKMDRLSGQMEAESSAMEQAKKEMDEGLRQFQNRQVANALFAVLSAVAQIGLAFLTAGATAPGAAASAAQAVNIAGQAAQGLRRVVEILEQLEAVMEVVAAVKDLVDSLEQVGQIVDAPVMPELPSEADWSIFVNEVEAVAEGMPTEVSEVPVWKAKCKNVAALGREMSITAVQMSELQYDIWVQGMMRDIAQSHADRLAAIQPANLTNYLEMAIQMDMRTTRILIGLLNILRIQNAALRYEYLLMPTELTTWPLGMDTVANLLITHESAALSGLAQLGPPSDFTSRHVVKGIPVSLLLDGGDWEFEIPVQGGMSSFPSSWTRVRIRHLEMHFVQEASGGGEIIHQPATQTGTIYILLQGSTVFHDRRREEVMTFQAAVPLNYHYAYRLDTGDSTLTNEPSEQFANKFMQMTPFTRWRLRLSASAAENKGLAFPTATAPDSTTEIAITFHVTAIRQIDWRHDEE

SEQ ID NO: 548 - protein, 852 aa, Artificial Sequence
  Synthetic
MDYSTLYRDLNQISMPLDRVEFSEVMVIHRMYLRLSDLNVGELPGAERVKRLYVFVDVVELATFAHPQLLNTRMPGSVTVIILCRLLQFPTDGSFAAWLELPFMELHTLIEQYRSEIKAADDAKWGTYVHAEEVQLSPLFNGWPYLVVEAQRCIITAAMHNTFNRPGWVRSITQFTTDQSGRVDTTLLARTEFGHIDLPLETDSPTAFSVSHRQSTNLPVEYTGIPVEVVTDPNILMGMQTSVHIAELVKACYPSPELVSAVGVHVNWLNEVLLRVVQKESQLQGTEAYNECLALLGRIQCVMKMGPFVSVVPQLQYRMYGSLINQMAQVAQNYDQDFRQLKLFIAQNQILGSYLLQQNKAFADREVQMESFHSAVISQRRQELDDAIAKMDRLSLQMEAESSAMEQAKKEMDEGLRQFQNRQVANALFAVLSAVAQIGLAFLTAGATAPGAVASAGQAVSIAGQAAQGLRRVVEILEQLEAVMEVVAAVKDLVDSLEQVGQIVDAPVMPELPSEADWSIFVNEVEAVAEGMPTEVSEVPVWRAKCKNVAALGREMSITAVQMSELQYDIWVQGMMRDMARSQADRLAAIQPADLTNYLEMATQMDMRTTRILIGLLNIMRIQNAALMYEYLLTPTQLTAWPLRMDTVANLLITHESAALSGLAQLGPPSDFTSRHVVKDIPVNLLLDGEDWEFEIPVQAGMSSFPSSWSRVRIRHLEMHFVKEASGGGEIIHQPATQTGTIYILLQGSTVFHDRRREEVMTFQAAVPLNYHYAYRLDTGEATLTNEPSEQFANTFMQMTPFTHWRLRLSASAAENKGLAFPTATALDSTTQIVITFHVTAIRQIDWRHEEE

SEQ ID NO: 549 - protein, 855 aa, Artificial Sequence
  Synthetic
MALVDYGKLFEDLNQISMPLDRVEFSEVMVIHRMYLRLSDLNVGELPGAERVKRLYVFADVVELATFAHPQLLNTRMPGSVTVIILCRLLQFPTDGSFAAWLELPFMELHTLIEQYRSEIKAADDAKWGTYVHAEEVQLSPLFNGWPYLVVEAQRCIITAAMHNTFNRPGWVRSITQFTTDQSGRVDTTLLARTEFGHIDLPLETDSPTAFSVSHRQSTNLPVEYTGIPVEVVTDPNILMGMQTSVHIAELVKACYPSPELVSAVGVHVNWLNEVLLRVVQKESQLQGTEAYNECLALLGRIQCVMKMGPFVSVVPQLQYRMYGSLINQMAQVAQNYDREFKQFKLFIIQNQILGSYLLQQNRAFAERELQMESFHAAVISQRREELDNTFAKMDRLSGQMEAESSAMEQAKKEMDEGLRQFQNRQVANALFAVLSAVAQIGLAFLTAGATAPGAAASAAQAVNIAGQAAQALRRVVEILEGLEAVMEVVAAIKHLVDALDQVSQIVDAPPMPDMPSEADWSIFVNEIEAVAEGMPTEVSEVPAWKAKCKNVAALGREMCITAEQISQLQYDIWVQGLLRDIAQSHADRLAAIQPANLTNYLEMAIQMDMRTTRILIGLLNIMRIQNAALMYEYLLTPTQLTAWPLRMDTVANLLITHESAALSGLAQLGPPSDFTSRHVVKGIPVSLLLDGGDWEFEIPVQGGMSSFPSSWTRVRIRHLEMHFVQEASGGGEIIHQPATQTGTIYILLQGSTVFHDRRREEVMTFQAAVPLNYHYAYRLDTGEATLTNEPSEQFANKFMQMTPFTRWRLRLSASAKENAGLAFPTATALDSTTQIVITFHVTAIRQIDWRHDEE

SEQ ID NO: 550 - protein, 852 aa, Artificial Sequence
  Synthetic
MDYSTLYRDLNQISMPLDRVEFSEVMVIHRMYLRLSDLNVGELPGAERVKRLYVLADVVELATFAHPQLLNTRMPGSVTVIILCRLLQFPTDGSFAAWLELPFMELHTLIEQYRSEIKAADDAKWGTYVHAEEVQLSPLFNGWPYLVVEAQRCIITAAMHNTFNRPGWVRSITQFTTDQSGRVDTTLLARTEFGHIDLPLETDSPTAFSVSHRQSTNLPVEYTGIPVEVVTDPNILMGMQTSVHIAELVKACHPSPELVSAVGVHVNWLNEVLLRVVQKESQLQGTEAYNECLALLGRIQCVMKMGPFVSVVPQLQYRMYGSLIRQMAQVAQNYDQDFRQLKLFIAQNQILGSYLLQQNKAFADREVQMESFHAAVISQRREELDDAIAKMDRLSLQMEEEDRAMEQARKEMEEGLKQFQNEQVARAVFAVLSAVAQIGLAFLTAGATAPGAAASAAQAVNIAGQAAQALRRVVEILEGLEAVMEVVAAIKHLVDALDQVSQIVDAPPMPDMPSEADWSIFVNEIEAVAEGMPTEVSEVPAWKAKCKNVAALGREMCITAEQISQLQYDIWVQGLLRDIAQSHADRLAAIQPANLTNYLEMAIQMDMRTTRILIGLLNIMRIQNAALMYEYLLTPTQLTAWPLRMDTVANLLITHESAALSGLAQLGPPSDFTSRHVVKGIPVSLLLDGGDWEFEIPVQGGMSSFPSSWTRVRIRHLEMHFVQEASGGGEIIHQPATQTGTIYILLQGSTVFHDRRREEVMTFQAAVPLNYHYAYRLDTGEATLTNEPSEQFANTFMQMTPFTHWRLRLSASAKENAGLAFPTATALDSTTQIVITFHVTAIRQIDWRHDEE

SEQ ID NO: 551 - protein, 852 aa, Artificial Sequence
  Synthetic
MDYSTLYRDLNQISMPLDRVEFSEVMVIHRMYLRLSDLNVGELPGAERVKRLYVLADVVELAAFAHPQLLNTRMPGSVTVIILCRLLQFPTDGSFAAWLELPFMELHTLIEQYRSEIKAADDAKWGTYVHAEEVQLSPLFNGWPYLVVEAQRCIITAAMHNTFNRPGWVRSITQFTTDQSGRVDTTLLARTEFGHIDLPLETDSPTAFSVSHRQSTNLPVEYTGIPVEVVTDPNILMGMQTSVHIAELVKACYPSPELVSAVGVHVNWLNEVLLRVVQKESQLQGTEAYNECLALLGRIQCVMKMGPFVSVVPQLQYRMYGSLIRQMAQVAQNYDQDFRQLKLFIAQNQILGSYLLQQNKAFADREVQMESFHSAVISQRRQELDNTFAKMDRLSGQMEAESSAMEQAKKEMDEGLRQFQNRQVANALFAVLSAVAQIGLAFLTAGATAPGAVASAGQAVSIAGQAAQGLRRVVEILEQLEAVMEVVAAVKDLVDSLEQVGQIVDAPVMPELPSEADWSIFVNEVEAVAEGMPTEVSEVPVWRAKCKNVAALGREMSITAVQMSELQYDIWVQGLLRDIAQSHADRLAAIQPANLTNYLEMAIQMDMRTTRMLLGLLNIMRIQNAALMYEYLLMPTELTTWPLGMDTVGDLLIAQENAALIGLMQLGPSSDFTSRHVVKDIPVNLLLDGEDWEFEIPVQGGMSSFPSSWTRVRIRHLEMHFVQEASGGGEIIHQPTTQTGTVYILLQGSTVFHDRRREEVMTFQAAVPLNYHYAYRLDTGEATLTNEPSEQFANTFMQMTPFTHWRLRLSASAAENKGLAFPTATALDSTTQIVITFHVTAIRQIDWRQEEE

SEQ ID NO: 552 - protein, 853 aa, Artificial Sequence
  Synthetic
MDYSTLYRDLNQISMPLDRVEFSEVMVIHRMYLRLSDLNVGELPGAERVKRLYVLADVVELATFAHPQLLNTRMPGSVTVIILCRLLQFPTDGSFAAWLELPFMELHTLIEQYRSEIKAADDAKWGTYVHAEEVQLSPLFNGWPYLVVEAQRCIITAAMHNTFNRPGWVRSITQFTTDQSGRVDTTLLARTEFGHIDLPLETDSPTAFSVSHRQSTNLPVEYTGIPVEVVTDPNILMGMQTSVHIAELVKACYPSPDVVSAVGEHLNWLNEVLLRVVQKESTQLQGSESYKECLALLGRVHAAMKMVRIGLVVPQLQYRMYGSLINQMAQVAQNYDREFKQFKLFIIQNQILGSYLLQQNRAFAERELQMESFHAAVISQRRQELDDAIAKMDRLSGQMEAESSAMEQAKKEMDEGLRQFQNRQVANALFAVLSAVAQIGLAFLTAGATAPGAVASAGQAVSIAGQAAQGLRRVVEILEQLEAVMEVVAAVKDLVDSLEQVGQIVDAPVMPELPSEADWSIFVNEVEAVAEGMPTEVSEVPAWKAKCKNVAALGREMCITAEQISQLQYDIWVQGLLRDIAQSHADRLAAIQPANLTNYLEMAIQMDMRTTRILIGLLNIMRIQNAALMYEYLLTPTELTTWPLGMDTVGDLLIAQENAALIGLMQLGPSSDFTSRHVVKGIPVSLLLDGGDWEFEIPVQGGMSSFPSSWTRVRIRHLEMHFVQEASGGGEIIHQPATQTGTIYILLQGSTVFHDRRREEVMTFQAAVPLNYHYAYRLDTGEATLTNEPSEQFANTFMQMTPFTHWRLRLSASAKENAGLAFPTATALDSTTQIVITFHVTAIRQIDWRQEEE

SEQ ID NO: 553 - protein, 854 aa, Artificial Sequence
  Synthetic
MDYSTLYRDLNQISMGVLDRVEFSEVMVIHRMYLRLSDLNVGELPGAERVKRLYVLADVVELATFAHPQLLNTRMPGSVTVIILCRLLQFPTDGSFAAWLELPFMKLHTLIEQYRSEIKAADDAKWGTYVHAEEVQLSPLFNGWPYLVVEAQRCIITAAMHNTFNRPGWVRSITQFTTDQSGRVDTTLLARTEFGHIDLPLETDSPTAFSVSHRQSTNLPVEYTGIPVEVVTDPNILMGMQTSVHIAELVKACYPSPELVSAVGVHVNWLNEVLLRVVQKESQLQGTEAYNECLALLGRIQCVMKMGPFVSVVPQLQYRMYGSLIRQMAQVAQNYDQDFRQLKLFIAQNQILGSYLLQQNKAFADREVQMESFHSAVISQRRQELDDAIAKMDRLSLQMEEEDRAMEQARKEMEEGLKQFQNEQVARAVFAVLKSVAMIALAFVTAGATAPGAVASAGQAVSIAGQAAQGLRRVVEILEGLEAVMEVVAAIKHLVDALDQVSQIVDAPPMPDMPSEADWSIFVNEIEAVAEGMPTEVSEVPVWRAKCKNVAALGREMSITAVQMSELQYDIWVQGMMRDMARSQADRLAAIQPADLTNYLEMATQMDMRTTRMLLGLLNILRIQNAALRYEYLLMPTELTTWPLRMDTVANLLITHESAALSGLAQLGPSSDFTSRHVVKDIPVNLLLDGEDWEFEIPVQAGMSSFPSSWSRVRIRHLEMHFVKEASGIGGEIIHQPTTQTGTVYILLQGSTVFHDRRREEVMTFQAAVPLNYHYAYRLDTGEATLTNEPSEQFANTFMQMTPFTRWRLRLSASAKENAGLAFPTATALDSTTQIVITFHVTAIRQIDWRHDEE

SEQ ID NO: 554 - protein, 852 aa, Artificial Sequence
  Synthetic
MDYSTLYRDLNQISMPLDRVEFSEVMVIHRMYLRLSDLNVGELPGAERVKRLYVLADVVELATFAHPQLLNTRMPGSVTVIILCRLLQFPTDGSFAAWLELPFMELHTLIEQYRSEIKAADDAKWGTYVHAEEVQLSPLFNGWPYLVVEAQRCIITAAMHNTFNRPGWVRSITQFTTDQSGRVDTTLLARTEFGHIDLPLETDSPTAFSVSHRQSTNLPVEYTGIPVEVVTDPNILLGMQTTVHIAELVKACHPSPDVVSAVGVHLNWLNKLLLPLKESTQLQGSEAYNECLALLGRIQCVMKMGPFVSVVPQLQYRMYGSLIRQMAQVAQNYDQDFRQLKLFIAQNQILGSYLLQQNKAFADREVQMESFHSAVISQRRQELDDAIAKMDRLSLQMEEEDRAMEQARKEMEEGLKQFQNEQVARAVFAVLKSVAMIALAFVTAGATAPGAAASAAQAVSIAGQAAQGLRRVVEILEQLEAVMEVVAAVKDLVDSLEQVGQIVDAPVMPELPSEADWSIFVNEVEAVAEGMPTEVSEVPAWKAKCKNVAALGREMCITAEQISQLQYDIWVQGLLRDIAQSHADRLAAIQPANLTNYLEMAIQMDMRTTRILIGLLNIMRIQNAALMYEYLLTPTQLTTWPLGMDTVGDLLIVQENAALIGLMQLGPPSDFTSRHVVKGIPVSLLLDGGDWEFEIPVQGGMSSFPSSWTRVRIRHLEMHFVQEASGIGGEIIHQPTTQTGTVYILLQGSTVFHDRRRDQVLPFQAAAPLNYHYAYRLDTGDSTLTNEPSEQFANKFMQMTPFTRWRLRLSASAKENAGLAFPTATALDSTTQIVITFHVTAIRQIDWRHDEE

SEQ ID NO: 555 - protein, 852 aa, Artificial Sequence
  Synthetic
MDYSTLYRDLNQISMPLDRVEFSEVMVIHRMYLRLSDLNVGELPGAERVKRLYVLADVVELATFAHPQLLNTRMPGSVTVIILCRLLQFPTDGSFAAWLELPFMELHTLIEQYRSEIKAADDAKWGTYVHAEEVQLSPLFNGWPYLVVEAQRCIITAAMHNTFNRPGWVRSITQFTTDQSGRVDTTLLARTEFGHIDLPLETDSPTAFSVSHRQSTNLPVEYTGIPVEVVTDPNILMGMQTSVHIAELVKACYPSPELVSAVGVHVNWLNEVLLRVVQKESQLQGTEAYNECLALLGRIQCVMKMGPFVSVVPQLQYRMYGSLINQMAQVAQNYDREFKQFKLFIIQNQILGSYLLQQNRAFADREVQMESFHSAVISQRREELDDAIAKMDRLSLQMEAESSAMEQAKKEMEEGLKQFQNEQVARAVFAVLKSVAMIALAFVTAGATAPGAAASAAQAVSIAGQAAQALRRVVEILEGLEAVMEVVAAVKDLVDALDQVSQIVDAPPMPDMPSEADWSIFVNEIEAVAEGMPTEVSEVPAWKAKCKNVAALGREMCITAEQISQLQYDIWVQGLLRDIARSQADRLAAIQPADLTNYLEMATQMDMRTTRMLLGLLNILRIQNAALRYEYLLMPTELTTWPLGMDTVGDLLIAQENAALIGLMQLGPSSDFTSRHVVKDIPVNLLLDGEDWEFEIPVQAGMSSFPSSWSRVRIRHLEMHFVQEASGGGEIIHQPATQTGTIYILLQGSTVFHDRRREEVMTFQAAVPLNYHYAYRLDTGEATLTNEPSEQFANTFMQMTPFTHWRLRLSASAAENKGLAFPTATAPDSTTEIAITFHVTAIRQIDWRQEEE

SEQ ID NO: 556 - protein, 853 aa, Artificial Sequence
  Synthetic
MDYSTLYRDLNQISMPLDRVEFSEVMVIHRMYLRLSDLNVGELPGAERVKRLYVLADVVELATFAHPQLLNTRMPGSVTVIILCRLLQFPTDGSFAAWLELPFMELHTLIEQYRSEIKAADDAKWGTYVHAEEVQLSPLFNGWPYLVVEAQRCIITAAMHNTFNRPGWVRSITQFTTDQSGRVDTTLLARTEFGHIDLPLETDSPTAFSVSHRQSTNLPVEYTGIPVEVVTDPNILMGMQTSVHIAELVKACYPSPELVSAVGVHVNWLNEVLLRVVQKESQLQGTEAYNECLALLGRIQCVMKMGPFVSVVPQLQYRMYGSLIRQMAQVAQNYDQDFRQLKLFIAQNQILGSYLLQQNKAFADREVQMESFHSAVISQRRQELDDAIAKMDRLSLQMEEEDRAMEQARKEMEEGLKQFQNEQVARAVFAVLKSVAMIALAFVTAGATAPGAAASAAQAVNIAGQAAQALRRVVEILEGLEAVMEVVAAVKDLVDSLEQVGQIVDAPVMPELPSEADWSIFVNEIEAVAEGMPTEVSEVPAWKAKCKNVAALGREMCITAEQISQLQYDIWVQGLLRDIAQSHADRLAAIQPADLTNYLEMATQMDMRTTRILIGLLNIMRIQNAALMYEYLLTPTQLTAWPLRMDTVANLLITHESAALSGLAQLGPPSDFTSRHVVKGIPVSLLLDGGDWEFEIPVQGGMSSFPSSWSRVRIRHLEMHFVKEASGIGGEIIHQPTTQTGTVYILLQGSTIFHDRRRDQVLPFQAAAPLNYHYAYRLDTGEATLTNEPSEQFANTFMQMTPFTHWRLRLSASAAENKGLAFPTATAPDSTTEIAITFHVTAIRQIDWRQEEE

SEQ ID NO: 557 - protein, 853 aa, Artificial Sequence; identical to SEQ ID NO: 552
  Synthetic

SEQ ID NO: 558 - protein, 852 aa, Artificial Sequence
  Synthetic
MDYSTLYRDLNQISMPLDRVEFSEVMVIHRMYLRLSDLNVGELPGAERVKRLYVLADVVELATFAHPQLLNTRMPGSVTVIILCRLLQFPTDGSFAAWLELPFMELHTLIEQYRSEIKAADDAKWGTYVHAEEVQLSPLFNGWPYLVVEAQRCIITAAMHNTFNRPGWVRSITQFTTDQSGRVDTTLLARTEFGHIDLPLETDSPTAFSVSHRQSTNLPVEYTGIPVEVVTDPNILMGMQTSVHIAELVKACYPSPELVSAVGVHVNWLNEVLLRVVQKESQLQGTEAYNECLALLGRIQCVMKMGPFVSVVPQLQYRMYGSLIRQMAQVAQNYDQDFRQLKLFIAQNQILGSYLLQQNRAFADREVQMESFHSAVISQRRQELDNTFAKMDRLSGQMEAESSAMEQAKKEMDEGLRQFQNRQVANALFAVLSAVAQIGLAFLTAGATAPGAVASAGQAVSIAGQAAQGLRRVVEILEGLEAVMEVVAAVKDLVDSLEQVGQIVDAPVMPELPSEADWSIFVNEVEAVAEGMPTEVSEVPAWKAKCKNVAALGREMCITAEQISQLQYDIWVQGLLRDIAQSHADRLAAIQPANLTNYLEMAIQMDMRTTRILIGLLNIMRIQNAALMYEYLLTPTQLTAWPLRMDTVGDLLITQENAALIGLMQLGPPSDFTSRHVVKGIPVSLLLDGGDWEFEIPVQGGMSSFPSSWTRVRIRHLEMHFVQEASGGGEIIHQPATQTGTIYILLQGSTVFHDRRREEVMTFQAAVPLNYHYAYRLDTGDSTLTNEPSEQFANKFMQMTPFTRWRLRLSASAKENAGLAFPTATALDSTTQIVITFHVTAIRQVDWRHDEE

SEQ ID NO: 559 - protein, 852 aa, Artificial Sequence
  Synthetic
MDYSTLYRDLNQISMPLDRVEFSEVMVIHRMYLRLSDLNVGQLEGAERVKRLYVFADVVELATFAHPQLLNTRMPGSVTVIILCRLLQFPTDGSFAAWLELPFMELHTLIEQYRSEIKAADDAKWGTYVHAEEVQLSPLFNGWPYLVVEAQRCIITAAMHNTFNRPGWVRSITQFTTDQSGRVDTTLLARTEFGHIDLPLETDSPTAFSVSHRQSTNLPVEYTGIPVEVVTDPNILMGMQTSVHIAELVKACYPSPELVSAVGVHVNWLNEVLLRVVQKESQLQGTEAYNECLALLGRIQCVMKMGPFVSVVPQLQYRMYGSLIRQMAQVAQNYDQDFRQLKLFIAQNQILGSYLLQQNKAFADREVQMESFHSAVISQRREELDNTFAKMDRLSLQMEAESSAMEQAKKEMDEGLRQFQNRQVANALFAVLKSVAMIALAFVTAGATAPGAVASAGQAVSIAGQAAQGLRRVVEILEQLEAVMEVVAAVKDLVDSLEQVGQIVDAPVMPELPSEADWSIFVNEVEAVAEGMPTEVSEVPVWRAKCKNVAALGREMSITAVQISQLQYDICVQGMMRDMARSQADRLAAIQPADLTNYLEMATQMDMRTTRILIGLLNIMRIQNAALMYEYLLTPTQLTAWPLRMDTVANLLITHESAALSGLAQLGPPSDFTSRHVVKGIPVSLLLDGGDWEFEIPVQGGMSSFPSSWTRVRIRHLEMHFVQEASGGGEIIHQPATQTGTVYILLQGSTVFHDRRREEVMTFQAAVPLNYHYAYRLDTGDSTLTNEPSEQFANKFMQMTPFTRWRLRLSASAKENAGLAFPTATALDSTTQIVITFHVTAIRQIDWRHDEE

SEQ ID NO: 560 - protein, 853 aa, Artificial Sequence
  Synthetic
MDYSTLYRDLNQISMPLDRVEFSEVMVIHRMYLRLSDLNVGELPGAERVKRLYVLADVVELATFAHPQLLNTRMPGSVTVIILCRLLQFPTDGSFAAWLELPFMELHTLIEQYRSEIKAADDAKWGTYVHAEEVQLSPLFNGWPYLVVEAQRCIITAAMHNTFNRPGWVRSITQFTTDQSGRVDTTLLARTEFGHIDLPLETDSPTAFSVSHRQSTNLPVEYTGIPVEVVTDPNILMGMQTSVHIAELVKACYPSPELVSAVGVHVNWLNEVLLRVVQKESQLQGTEAYNECLALLGRIQCVMKMGPFVSVVPQLQYRMYGSLIRQMAQVAQNYDQDFRQLKLFIAQNQILGSYLLQQNKAFADREVQMESFHSAVISQRRQELDDAIAKMDRLSLQMEEEDRAMEQAKKEMDEGLKQFQNEQVARAVFAVLKSVAMIALAFVTAGATAPGAVASAGQAVSIAGQAAQGLRRVVEILEGLEAVMEVVAAIKHLVDALDQVSQIVDAPPMPDMPSEADWSIFVNEVEAVAEGMPTEVSEVPVWRAKCKNVAALGREMSITAVQMSELQYDIWVQGMMRDMARSQTDRLAAIQPADLTNYLEMATQMDMRTTRMLLGLLNILRIQNAALRYEYLLMPTELTTWPLGMDTVGDLLIAQENAALIGLMQLGPSSDFTSRHVVKDIPVNLLLDGEDWEFEIPVQAGMSSFPSSWSRVRIRHLEMHFVKEASGIGGEIIHQPTTQTGTVYILLQGSTIFHDRRRDQVLPFQAAAPLNYHYAYRLDTGDSTLTNEPSEQFANKFMQMTPFTRWRLRLSASAKENAGLAFPTATALDSTTQIVITFHVTAIRQIDWRHDEE

SEQ ID NO: 561 - protein, 853 aa, Artificial Sequence
  Synthetic
MDYSTLYRDLNQISMPLDRVEFSEVMVIHRMYLRLSDLNVGELPGAERVKRLYVLADVVELATFAHPQLLNTRMPGSVTVIILCRLLQFPTDGSFAAWLELPFMELHTLIEQYRSEIKAADDAKWGTYVHAEEVQLSPLFNGWPYLVVEAQRCIITAAMHNTFNRPGWVRSITQFTTDQSGRVDTTLLARTEFGHIDLPLETDSPTAFSVSHRQSTNLPVEYTGIPVEVVTDPNILMGMQTSVHIAELVKACYPSPELVSAVGVHVNWLNEVLLRVVQKESQLQGTEAYNECLALLGRIQCVMKMGPFVSVVPQLQYRMYGSLIRQMAQVAQNYDQEFKQFKLFIIQNQILGSYLLQQNRAFAERELQMESFHAAVISQRREELDNTFAKMDRLSGQMEAESSAMEQAKKEMDEGLRQFQNRQVANALFAVLSAVAQIGLAFVTAGATAPGAVASAGQAVSIAGQAAQGLRRVVEILEQLEAVMEVVAAIKHLVDALDQVSQIVDAPPMPDMPSEADWSIFVNEIEAVAEGMPTEVSEVPVWKAKCKNVAALGREMCITAVQMSELQYDIWVQGLLRDIAQSHADRLAAIQPANLTNYLEMAIQMDMRTTRILIGLLNIMRIQNAALMYEYLLTPTQLTAWPLRMDTVANLLITHESAALSGLAQLGPSSDFTSRHVVKDIPVNLLLDGEDWEFEIPVQAGMSSFPSSWSRVRIRHLEMHFVKEASGIGGEIIHQPTTQTGTVYILLQGSTIFHDRRRDQVLPFQAAAPLNYHYAYRLDTGEATLTNEPSEQFANTFMQMTPFTHWRLRLSASAAENKGLAFPTATALDSTTQIVITFHVTAIRQIDWRQEEE

SEQ ID NO: 562 - protein, 852 aa, Artificial Sequence
  Synthetic
MDYSTLYRDLNQISMPLDRVEFSEVMVIHRMYLRLSDLNVGQLEGAEKVKRLYVLADVVELATFAHPQLLNTRMPGSVTVIILCRLLQFPTDGSFAAWLELPFMELHTLIEQYRSEIKAADDAKWGTYVHAEEVQLSPLFNGWPYLVVEAQRCIITAAMHNTFNRPGWVRSITQFTTDQSGRVDTTLLARTEFGHIDLPLETDSPTAFSVSHRQSTNLPVEYTGIPVEVVTDPNILMGMQTSVHIAELVKACYPSPELVSAVGVHVNWLNEVLLRVVQKESQLQGTEAYNECLALLGRIQCVMKMGPFVSVVPQLQYRMYGSLIRQMAQVAQNYDQDFRQLKLFIAQNQILGSYLLQQNKAFADREVQMESFHSAVISQRREELDDAIAKMDRLSLQMEEEDRAMEQARKEMEEGLKQFQNEQVARAVFAVLKSVAMIALAFVTAGATAPGAAASAAQAVNIAGQAAQALRRVVEILEQLEAVMEVVAAVKDLVDSLEQVGQIVDAPVMPELPSEADWSIFVNEVEAVAEGMPTEVSEVPAWKAKCKNVAALGREMSITAEQISQLQYDIWVQGLLRDMARSQADRLAAIQPADLTNYLEMATQMDMRTTRMLLGLLNILRIQNAALRYEYLLMPTELTTWPLGMDTVGDLLIAQENAALIGLMQLGPSSDFTSRHVVKDIPVSLLLDGGDWEFEIPVQGGMSSFPSSWTRVRIRHLEMHFVQEASGGGEIIHQPATQTGTIYILLQGSTVFHDRRREEVMTFQAAVPLNYHYAYRLDTGEATLTNEPSEQFANKFMQMTPFTRWRLRLSASAAENKGLAFPTATAPDSTTEIAITFHVTAIRQIDWRQEEE

SEQ ID NO: 563 - protein, 867 aa, Artificial Sequence
  Synthetic
MALVDYGKLFEDLNQISMGVLDRVEFSEVMVIHRMYVRLADLNVGQLEGAEKVKRLYVFADVVELPVVEWRWPPQIPGSVTVIILCRLLQWPTDGRQSDTELHLTFMKLHAIQREENRWEITAADGMNWGVYIHAEEVQVGVLTMSWSSVLRVSALRSVITSGFRAVSVFEVPGSVRSTLGATLRPDHALYSTTMQATPNASHISAFNLRIVSPSAYRVCPLQNDTDTYLGIPADVAAVLPVDVVTDPNILLGMQTTVHIAELVKACHPSPDVVSAVGEHLNWLNKLLLPLKESTQLQGSESYKECLALLGRVHAAMKMVRIGLVVPQLQYRMYGSLINQMAQVAQNYDREFKQFKLFIIQNQILGSYLLQQNRAFAERELQMESFHAAVISQRRQELDDAIAKMDRLSGQMEAESSAMEQAKKEMDEGLRQFQNRQVANALFAVLSAVAQIGLAFLTAGATAPGAVASAGQAVSIAGQAAQGLRRVVEILEGLEAVMEVVAAVKDLVDSLEQVGQIVDAPVMPELPSEADWSIFVNEVEAVAEGMPTEVSEVPVWRAKCKNVAALGREMSITAVQISQLQYDIWVQGMMRDMARSQADRLAAIQPADLTNYLEMATQMDMRTTRMLLGLLNILRIQNAALRYEYLLMPTELTTWPLGMDTVGDLLIAQENAALIGLMQLGPSSDFTSRHVVKGIPVSLLLDGGDWEFEIPVQAGMSSFPSSWSRVRIRHLEMHFVQEASGIGGEIIHQPATQTGTVYILLQGSTIFHDRRRDQVLPFQAAAPLNYHYAYRLDTGDSTLTNEPSEQFANKFMQMTPFTRWRLRLSASAKENAGLAFPTATALDSTTQIVITFHVTAIRQIDWRHDEE

SEQ ID NO: 564 - protein, 867 aa, Artificial Sequence
  Synthetic
MALVDYGKLFEDLNQISMGVLDRVEFSEVMVIHRMYVRLADLNVGQLEGAEKVKRLYVFADVVELPVVEWRWPPQIPGSVTVIILCRLLQWPTDGRQSDTELHLTFMKLHAIQREENRWEITAADGMNWGVYIHAEEVQVGVLTMSWSSVLRVSALRSVITSGFRAVSVFEVPGSVRSTLGATLRPDHALYSTTMQATPNASHISAFNLRIVSPSAYRVCPLQNDTDTYLGIPADVAAVLPVDVVTDPNILLGMQTTVHIAELVKACHPSPDVVSAVGEHLNWLNKLLLPLKESTQLQGSESYKECLALLGRVHAAMKMVRIGLVVPQLQYRMYGSLINQMAQVAQNYDREFKQFKLFIIQNQILGSYLLQQNRAFAERELQMESFHAAVISQRREELDNTFAKMDRLSLQMEEEDRAMEQAKKEMDEGLRQFQNRQVANALFAVLSAVAQIGLAFLTAGATAPGAVASAGQAVSIAGQAAQGLRRVVEILEGLEAVMEVVAAIKHLVDSLEQVGQIVDAPVMPELPSEADWSIFVNEVEAVAEGMPTEVSEVPVWKAKCKNVAALGREMSITAVQMSELQYDIWVQGMMRDMARSQADRLAAIQPADLTNYLEMATQMDMRTTRMLLGLLNILRIQNAALRYEYLLMPTELTTWPLGMDTVGDLLIAQENAALIGLMQLGPSSDFTSRHVVKDIPVNLLLDGEDWEFEIPVQGGMSSFPSSWTRVRIRHLEMHFVKEASGIGGEIIHQPATQTGTVYILLQGSTIFHDRRREEVLPFQAAAPLNYHYAYRLDTGEATLTNEPSEQFANTFMQMTPFTRWRLRLSASAAENKGLAFPTATAPDSTTEIAITFHVTAIRQIDWRQEEE

SEQ ID NO: 565 - protein, 866 aa, Artificial Sequence
  Synthetic
MALVDYGKLFEDLNQISMGVLDRVEFSEVMVIHRMYVRLADLNVGQLEGAEKVKRLYVFADVVELPVVEWRWPPQIPGSVTVIILCRLLQWPTDGRQSDTELHLTFMKLHAIQREENRWEITAADGMNWGVYIHAEEVQVGVLTMSWSSVLRVSALRSVITSGFRAVSVFEVPGSVRSTLGATLRPDHALYSTTMQATPNASHISAFNLRIVSPSAYRVCPLQNDTDTYLGIPADVAAVLPVDVVTDPNILLGMQTTVHIAELVKACHPSPDVVSAVGEHLNWLNKLLLPLKESTQLQGSESYKECLALLGRVHAAMKMVRIGLVVPQLQYRMYGSLINQMAQVAQNYDREFKQFKLFIIQNQILGSYLLQQNRAFAERELQMESFHSAVISQRREELDNTFAKMDRLSLQMEEEDRAMEQAKKEMDEGLRQFQNRQVANALFAVLSAVAQIGLAFLTAGATAPGAVASAGQAVSIAGQAAQGLRRVVEILEQLEAVMEVVAAVKDLVDSLEQVGQIVDAPVMPELPSEADWSIFVNEVEAVAEGMPTEVSEVPAWKAKCKNVAALGREMCITAEQISQLQYDIWVQGMMRDMARSQADRLAAIQPADLTNYLEMATQMDMRTTRMLLGLLNILRIQNAALRYEYLLMPTELTTWPLGMDTVGDLLIAHESAALSGLAQLGPPSDFTSRHVVKGIPVSLLLDGGDWEFEIPVQGGMSSFPSSWTRVRIRHLEMHFVQEASGGGEIIHQPATQTGTIYILLQGSTVFHDRRREEVMTFQAAVPLNYHYAYRLDTGEATLTNEPSEQFANTFMQMTPFTHWRLRLSASAAENKGLAFPTATAPDSTTEIAITFHVTAIRQIDWRHDEE

SEQ ID NO: 566 - protein, 867 aa, Artificial Sequence
  Synthetic
MALVDYGKLFEDLNQISMGVLDRVEFSEVMVIHRMYVRLADLNVGQLEGAEKVKRLYVFADVVELPVVEWRWPPQIPGSVTVIILCRLLQWPTDGRQSDTELHLTFMKLHAIQREENRWEITAADGMNWGVYIHAEEVQVGVLTMSWSSVLRVSALRSVITSGFRAVSVFEVPGSVRSTLGATLRPDHALYSTTMQATPNASHISAFNLRIVSPSAYRVCPLQNDTDTYLGIPADVAAVLPVDVVTDPNILLGMQTTVHIAELVKACHPSPDVVSAVGEHLNWLNKLLLPLKESTQLQGSESYKECLALLGRVHAAMKMVRIGLVVPQLQYRMYGSLINQMAQVAQNYDREFKQFKLFIIQNQILGSYLLQQNRAFAERELQMESFHSAVISQRRQELDDAIAKMDRLSGQMEAESSAMEQAKKEMDEGLRQFQNRQVANALFAVLSAVAMIALAFVTAGATAPGAVASAGQAVSIAGQAAQGLRRVVEILEGLEAVMEVVAAVKDLVDSLEQVGQIVDAPVMPELPSEADWSIFVNEVEAVAEGMPTEVSEVPVWKAKCKNVAALGREMSITAVQMSELQYDIWVQGMMRDMARSHADRLAAIQPANLTNYLEMAIQMDMRTTRMLLGLLNILRIQNAALRYEYLLTPTELTTWPLGMDTVGDLLIAQENAALIGLMQLGPPSDFTSRHVVKGIPVSLLLDGGDWEFEIPVQGGMSSFPSSWSRVRIRHLEMHFVKEASGIGGEIIHQPTTQTGTVYILLQGSTVFHDRRREEVMTFQAAVPLNYHYAYRLDTGDSTLTNEPSEQFANKFMQMTPFTRWRLRLSASAKENAGLAFPTATAPDSTTEIVITFHVTAIRQIDWRHDEE

SEQ ID NO: 567 - protein, 866 aa, Artificial Sequence
  Synthetic
MALVDYGKLFEDLNQISMGVLDRVEFSEVMVIHRMYVRLADLNVGQLEGAEKVKRLYVFADVVELPVVEWRWPPQIPGSVTVIILCRLLQWPTDGRQSDTELHLTFMKLHAIQREENRWEITAADGMNWGVYIHAEEVQVGVLTMSWSSVLRVSALRSVITSGFRAVSVFEVPGSVRSTLGATLRPDHALYSTTMQATPNASHISAFNLRIVSPSAYRVCPLQNDTDTYLGIPADVAAVLPVDVVTDPNILLGMQTTVHIAELVKACHPSPDVVSAVGEHLNWLNKLLLPLKESTQLQGSESYKECLALLGRVHAAMKMVRIGLVVPQLQYRMYGSLINQMAQVAQNYDREFKQFKLFIIQNQILGSYLLQQNRAFAERELQMESFHAAVISQRRQELDDAIAKMDRLSLQMEAEDRAMEQAKKEMDEGLKQFQNRQVANALFAVLSAVAQIGLAFVTAGATAPGAVASAGQAVSIAGQAAQGLRRVVEILEQLEAVMEVVAAVKDLVDSLEQVGQIVDAPVMPELPSEADWSIFVNEVEAVAEGMPTEVSEVPVWRAKCKNVAALGREMSITAVQMSELQYDIWVQGLLRDIAQSHADRLAAIQPADLTNYLEMATQMDMRTTRMLLGLLNILRIQNAALRYEYLLMPTELTTWPLGMDTVGDLLIAQENAALIGLMQLGPSSDFTSRHVVKDIPVNLLLDGEDWEFEIPVQGGMSSFPSSWSRVRIRHLEMHFVQEASGGGEIIHQPATQTGTIHILLQGSTVFHDRRRDQVLPFQAAAPLNYHYAYRLDTGEATLTNEPSEQFANKFMQMTPFTRWRLRLSASAKENAGLAFPTATAPDSTTEIAITFHVTAIRQIDWRQEEE

SEQ ID NO: 568 - protein, 866 aa, Artificial Sequence
  Synthetic
MALVDYGKLFEDLNQISMGVLDRVEFSEVMVIHRMYVRLADLNVGQLEGAEKVKRLYVFADVVELPVVEWRWPPQIPGSVTVIILCRLLQWPTDGRQSDTELHLTFMKLHAIQREENRWEITAADGMNWGVYIHAEEVQVGVLTMSWSSVLRVSALRSVITSGFRAVSVFEVPGSVRSTLGATLRPDHALYSTTMQATPNASHISAFNLRIVSPSAYRVCPLQNDTDTYLGIPADVAAVLPVDVVTDPNILLGMQTTVHIAELVKACHPSPDVVSAVGEHLNWLNKLLLPLKESTQLQGSESYKECLALLGRVHAAMKMVRIGLVVPQLQYRMYGSLINQMAQVAQNYDREFKQFKLFIIQNQILGSYLLQQNRAFADREVQMESFHAAVISQRREELDNTFAKMDRLSGQMEAESSAMEQAKKEMDEGLRQFQNRQVANALFAVLSAVAQIGLAFLTAGATAPGAVASAGQAVSIAGQAAQGLRRVVEILEQLEAVMEVVAAVKDLVDSLEQVSQIVDAPPMPDMPSEADWSIFVNEVEAVAEGMPTEVSEVPVWRAKCKNVAALGREMSITAEQISQLQYDIWVQGMMRDMARSQADRLAAIQPADLTNYLEMATQMDMRTTRMLLGLLNILRIQNAALMYEYLLTPTQLTAWPLRMDTVANLLITHESAALSGLAQLGPPSDFTSRHVVKDIPVNLLLDGEDWEFEIPVQAGMSSFPSSWTRVRIRHLEMHFVQEASGGGEIIHQPTTQTGTVYILLQGSTIFHDRRREEVMTFQAAVPLNYHYAYRLDTGEATLTNEPSEQFANTFMQMTPFTHWRLRLSASAAENKGLAFPTATAPDSTTEIAITFHVTAIRQIDWRQEEE

SEQ ID NO: 569 - protein, 866 aa, Artificial Sequence
  Synthetic
MALVDYGKLFEDLNQISMGVLDRVEFSEVMVIHRMYVRLADLNVGQLEGAEKVKRLYVFADVVELPVVEWRWPPQIPGSVTVIILCRLLQWPTDGRQSDTELHLTFMKLHAIQREENRWEITAADGMNWGVYIHAEEVQVGVLTMSWSSVLRVSALRSVITSGFRAVSVFEVPGSVRSTLGATLRPDHALYSTTMQATPNASHISAFNLRIVSPSAYRVCPLQNDTDTYLGIPADVAAVLPVDVVTDPNILLGMQTTVHIAELVKACHPSPDVVSAVGEHLNWLNKLLLPLKESTQLQGSESYKECLALLGRVHAAMKMVRIGLVVPQLQYRMYGSLINQMAQVAQNYDREFKQFKLFIIQNQILGSYLLQQNKAFADREVQMESFHSAVISQRRQELDDAIAKMDRLSGQMEAESSAMEQAKKEMDEGLRQFQNRQVANALFAVLSAVAQIGLAFVTAGATAPGAVASAGQAVSIAGQAAQGLRRVVEILEGLEAVMEVVAAVKDLVDSLEQVGQIVDAPVMPELPSEADWSIFVNEVEAVAEGMPTEVSEVPVWRAKCKNVAALGREMCITAVQMSELQYDIWVQGLLRDMARSQADRLAAIQPADLTNYLEMATQMDMRTTRMLLGLLNILRIQNAALRYEYLLMPTELTTWPLGMDTVGDLLIAQENAALIGLMQLGPSSDFTSRHVVKGIPVSLLLDGGDWEFEIPVQAGMSSFPSSWTRVRIRHLEMHFVKEASGGGEIIHQPATQTGTIYILLQGSTIFHDRRRDQVLPFQAAAPLNYHYAYRLDTGEATLTNEPSEQFANTFMQMTPFTRWRLRLSASAAENKGLAFPTATAPDSTTEIAITFHVTAIRQIDWRHDEE

SEQ ID NO: 570 - protein, 867 aa, Artificial Sequence
  Synthetic
MALVDYGKLFEDLNQISMGVLDRVEFSEVMVIHRMYVRLADLNVGQLEGAEKVKRLYVFADVVELPVVEWRWPPQIPGSVTVIILCRLLQWPTDGRQSDTELHLTFMKLHAIQREENRWEITAADGMNWGVYIHAEEVQVGVLTMSWSSVLRVSALRSVITSGFRAVSVFEVPGSVRSTLGATLRPDHALYSTTMQATPNASHISAFNLRIVSPSAYRVCPLQNDTDTYLGIPADVAAVLPVDVVTDPNILLGMQTTVHIAELVKACHPSPDVVSAVGEHLNWLNKLLLPLKESTQLQGSESYKECLALLGRVHAAMKMVRIGLVVPQLQYRMYGSLINQMAQVAQNYDREFKQFKLFIIQNQILGSYLLQQNRAFAERELQMESFHSAVISQRREELDNTFAKMDRLSGQMEAESSAMEQAKKEMDEGLRQFQNRQVANALFAVLSAVAQIGLAFLTAGATAPGAAASAAQAVNIAGQAAQALRRVVEILEGLEAVMEVVAAIKHLVDALDQVSQIVDAPVMPELPSEADWSIFVNEVEAVAEGMPTEVSEVPAWKAKCKNVAALGREMSITAVQMSELQYDIWVQGLLRDMARSQADRLAAIQPADLTNYLEMATQMDMRTTRMLLGLLNILRIQNAALRYEYLLMPTELTTWPLGMDTVGDLLITHESAALSGLAQLGPPSDFTSRHVVKGIPVSLLLDGEDWEFEIPVQAGMSSFPSSWSRVRIRHLEMHFVKEASGIGGEIIHQPTTQTGTVYILLQGSTVFHDRRREEVMTFQAAAPLNYHYAYRLDTGEATLTNEPSEQFANTFMQMTPFTRWRLRLSASAKENAGLAFPTATAPDSTTEIAITFHVTAIRQIDWRHDEE

SEQ ID NO: 571 - protein, 866 aa, Artificial Sequence
  Synthetic
MALVDYGKLFEDLNQISMGVLDRVEFSEVMVIHRMYVRLADLNVGQLEGAEKVKRLYVFADVVELPVVEWRWPPQIPGSVTVIILCRLLQWPTDGRQSDTELHLTFMKLHAIQREENRWEITAADGMNWGVYIHAEEVQVGVLTMSWSSVLRVSALRSVITSGFRAVSVFEVPGSVRSTLGATLRPDHALYSTTMQATPNASHISAFNLRIVSPSAYRVCPLQNDTDTYLGIPADVAAVLPVDVVTDPNILLGMQTTVHIAELVKACHPSPDVVSAVGEHLNWLNKLLLPLKESTQLQGSESYKECLALLGRVHAAMKMVRIGLVVPQLQYRMYGSLINQMAQVAQNYDREFKQFKLFIIQNQILGSYLLQQNRAFAERELQMESFHAAVISQRREELDDAIAKMDRLSLQMEEEDRAMEQAKKEMDEGLRQFQNRQVANALFAVLSAVAQIGLAFVTAGATAPGAVASAGQAVSIAGQAAQGLRRVVEILEGLEAVMEVVAAVKDLVDSLEQVGQIVDAPVMPDMPSEADWSIFVNEVEAVAEGMPTEVSEVPVWRAKCKNVAALGREMCITAVQMSELQYDIWVQGMMRDMARSQADRLAAIQPADLTNYLEMATQMDMRTTRMLLGLLNIMRIQNAALMYEYLLTPTQLTAWPLRMDTVANLLITQENAALIGLMQLGPSSDFTSRHVVKDIPVNLLLDGEDWEFEIPVQGGMSSFPSSWSRVRIRHLEMHFVQEASGGGEIIHQPTTQTGTVYILLQGSTIFHDRRRDQVLPFQAAAPLNYHYAYRLDTGDSTLTNEPSEQFANKFMQMTPFTRWRLRLSASAAENKGLAFPTATAPDSTTEIAITFHVTAIRQIDWRQEEE

SEQ ID NO: 572 - protein, 866 aa, Artificial Sequence
  Synthetic
MALVDYGKLFEDLNQISMGVLDRVEFSEVMVIHRMYVRLADLNVGQLEGAEKVKRLYVFADVVELPVVEWRWPPQIPGSVTVIILCRLLQWPTDGRQSDTELHLTFMKLHAIQREENRWEITAADGMNWGVYIHAEEVQVGVLTMSWSSVLRVSALRSVITSGFRAVSVFEVPGSVRSTLGATLRPDHALYSTTMQATPNASHISAFNLRIVSPSAYRVCPLQNDTDTYLGIPADVAAVLPVDVVTDPNILLGMQTTVHIAELVKACHPSPDVVSAVGEHLNWLNKLLLPLKESTQLQGSESYKECLALLGRVHAAMKMVRIGLVVPQLQYRMYGSLINQMAQVAQNYDREFKQFKLFIIQNQILGSYLLQQNRAFAERELQMESFHAAVISQRRQELDDAIAKMDRLSLQMEEEDRAMEQAKKEMDEGLRQFQNRQVANALFAVLSAVAQIGLASLTAGATAPGAVASAGQAVSIAGQAAQGLRRVVEILEGLEAVMEVVAAVKDLVDSLEQVGQIVDAPVMPELPSEADWSIFVNEVEAVAEGMPTEVSEVPVWRAKCKNVAALGREMCITAEQMSELQYDIWVQGMMRDMARSQADRLAAIQPADLTNYLEMAIQMDMRTTRMLLGLLNILRIQNAALRYEYLLMPTELTTWPLGMDTVGDLLIAQENAALIGLMQLGPSSDFTSRHVVKDIPVNLLLDGEDWEFEIPVQAGMSSFPSSWSRVRIRHLEMHFVQEASGGGEIIHQPATQTGTVYILLQGSTIFHDRRREEVMTFQAAVPLNYHYAYRLDTGDSTLTNEPSEQFANKFMQMTPFTRWRLRLSASAKENAGLAFPTATAPDSTTEIAITFHVTAIRQIDWRHDEE

SEQ ID NO: 573 - protein, 866 aa, Artificial Sequence
  Synthetic
MALVDYGKLFEDLNQISMGVLDRVEFSEVMVIHRMYVRLADLNVGQLEGAEKVKRLYVFADVVELPVVEWRWPPQIPGSVTVIILCRLLQWPTDGRQSDTELHLTFMKLHAIQREENRWEITAADGMNWGVYIHAEEVQVGVLTMSWSSVLRVSALRSVITSGFRAVSVFEVPGSVRSTLGATLRPDHALYSTTMQATPNASHISAFNLRIVSPSAYRVCPLQNDTDTYLGIPADVAAVLPVDVVTDPNILLGMQTTVHIAELVKACHPSPDVVSAVGEHLNWLNKLLLPLKESTQLQGSESYKECLALLGRVHAAMKMVRIGLVVPQLQYRMYGSLINQMAQVAQNYDREFKQFKLFIIQNQILGSYLLQQNRAFAERELQMESFHAAVISQRRQELDDAIAKMDRLSLQMEEEDRAMEQARKEMEEGLRQFQNEQVARAVFAVLKSVAMIALAFVTAGATAPGAVASAGQAVSIAGQAAQGLRRVVEILEGLEAVMEVVAAVKDLVDSLEQVGQIVDAPVMPELPSEADWSIFVNEVEAVAEGMPTEVSEVPAWRAKCKNVAALGREMCITAVQMSELQYDIWVQGMMRDMARSQADRLAAIQPADLTNYLEMAIQMDMRTTRMLLGLLNILRIQNAALRYEYLLMPTELTTWPLGMDTVGDLLIAHESAALSGLAQLGPPSDFTSRHVVKGIPVSLLLDGGDWEFEIPVQGGMSSFPSSWTRVRIRHLEMHFVQEASGGGEIIHQPATQTGTIYILLQGSTVFHDRRRDQVLPFQAAAPLNYHYAYRLDTGDSTLTNEPSEQFANKFMQMTPFTHWRLRLSASAKENAGLAFPTATALDSTTQIVITFHVTAIRQIDWRQEEE

SEQ ID NO: 574 - protein, 867 aa, Artificial Sequence
  Synthetic
MALVDYGKLFEDLNQISMGVLDRVEFSEVMVIHRMYVRLADLNVGQLEGAEKVKRLYVFADVVELPVVEWRWPPQIPGSVTVIILCRLLQWPTDGRQSDTELHLTFMKLHAIQREENRWEITAADGMNWGVYIHAEEVQVGVLTMSWSSVLRVSALRSVITSGFRAVSVFEVPGSVRSTLGATLRPDHALYSTTMQATPNASHISAFNLRIVSPSAYRVCPLQNDTDTYLGIPADVAAVLPVDVVTDPNILLGMQTTVHIAELVKACHPSPDVVSAVGEHLNWLNKLLLPLKESTQLQGSESYKECLALLGRVHAAMKMVRIGLVVPQLQYRMYGSLINQMAQVAQNYDREFKQFKLFIIQNQILGSYLLQQNRAFAERELQMESFHAAVISQRRQELDNTFAKMDRLSGQMEEEDRAMEQARKEMEEGLRQFQNRQVANALFAVLSAVAQIGLAFLTAGATAPGAVASAGQAVSIAGQAAQGLRRVVEILEGLEAVMEVVAAVKDLVDSLEQVGQIVDAPVMPELPSEADWSIFVNEIEAVAEGMPTEVSEVPAWKAKCKNVAALGREMSITAVQMSELQYDIWVQGMMRDMARSQADRLAAIQPADLTNYLEMATQMDMRTTRMLLGLLNIMRIQNAALMYEYLLTPTQLTAWPLGMDTVGDLLITHESAALSGLAQLGPPSDFTSRHVVKGIPVSLLLDGGDWEFEIPVQGGMSSFPSSWSRVRIRHLEMHFVKEASGIGGEIIHQPATQTGTIYILLQGSTVFHDRRRDQVLPFQAAAPLNYHYAYRLDTGEATLTNEPSEQFANKFMQMTPFTRWRLRLSASAKENAGLAFPTATALDSTTQIVITFHVTAIRQIDWRQEEE

SEQ ID NO: 575 - protein, 866 aa, Artificial Sequence
  Synthetic
MALVDYGKLFEDLNQISMGVLDRVEFSEVMVIHRMYVRLADLNVGQLEGAEKVKRLYVFADVVELPVVEWRWPPQIPGSVTVIILCRLLQWPTDGRQSDTELHLTFMKLHAIQREENRWEITAADGMNWGVYIHAEEVQVGVLTMSWSSVLRVSALRSVITSGFRAVSVFEVPGSVRSTLGATLRPDHALYSTTMQATPNASHISAFNLRIVSPSAYRVCPLQNDTDTYLGIPADVAAVLPVDVVTDPNILLGMQTTVHIAELVKACHPSPDVVSAVGEHLNWLNKLLLPLKESTQLQGSESYKECLALLGRVHAAMKMVRIGLVVPQLQYRMYGSLINQMAQVAQNYDREFKQFKLFIIQNQILGSYLLQQNRAFAERELQMESFHSAVISQRRQELDDAIAKMDRLSGQMEAESSAMEQAKKEMDEGLRQFQNRQVANALFAVLSAVAQIGLALLTAGATAPGAVASAGQAVSIAGQAAQGLRRVVETLEQLEAVMEVVAAVKDLVDSLEQVGQIVDAPPMPDMPSEADWSIFVNEIEAVAEGMPTEVSEVPAWKAKCKNVAALGREMSITAVQMSELQYDIWVQGMMRDMARSQADRLAAIQPADLTNYLEMATQMDMRTTRMLLGLLNILRIQNAALRYEYLLMPTELTTWPLGMDTVGDLLIAQENAALIGLMQLGPSSDFTSRHVVKGIPVSLLLDGGDWEFEIPVQGGMSSFPSSWSRVRIRHLEMHFVQEASGGGEIIHQPTTQTGTVYILLQGSTIFHDRRREEVMTFQAAVPLNYHYAYRLDTGEATLTNEPSEQFANKFMQMTPFTRWRLRLSASAKENAGLAFPTATALDSTTQIVITFHVTAIRQIDWRHDEE

SEQ ID NO: 576 - protein, 867 aa, Artificial Sequence
  Synthetic
MALVDYGKLFEDLNQISMGVLDRVEFSEVMVIHRMYVRLADLNVGQLEGAEKVKRLYVFADVVELPVVEWRWPPQIPGSVTVIILCRLLQWPTDGRQSDTELHLTFMKLHAIQREENRWEITAADGMNWGVYIHAEEVQVGVLTMSWSSVLRVSALRSVITSGFRAVSVFEVPGSVRSTLGATLRPDHALYSTTMQATPNASHISAFNLRIVSPSAYRVCPLQNDTDTYLGIPADVAAVLPVDVVTDPNILLGMQTTVHIAELVKACHPSPDVVSAVGEHLNWLNKLLLPLKESTQLQGSESYKECLALLGRVHAAMKMVRIGLVVPQLQYRMYGSLINQMAQVAQNYDREFKQFKLFIIQNQILGSYLLQQNRAFAERELQMESFHSAVISQRRQELDDAIAKMDRLSLQMEEEDRAMEQARKEMEEGLRQFQNRQVANALFAVLKSVAMIALAFVTAGATAPGAVASAGQAVSIAGQAAQGLRRVVEILEQLEAVMEVVAAVKDLVDSLEQVGQIVDAPVMPDMPSEADWSIFVNEVEAVAEGMPTEVSEVPVWRAKCKNVAALGREMSITAVQMSELQYDIWVQGMMRDMARSQADRLAAIQPANLTNYLEMATQMDMRTTRMLLGLLNIMRIQNAALRYEYLLMPTELTTWPLGMDTVGDLLIAQENAALIGLMQLGPSSDFTSRHVVKGIPVSLLLDGGDWEFEIPVQGGMSSFPSSWSRVRIRHLEMHFVQEASGIGGEIIHQPATQTGTIYILLQGSTVFHDRRRDQVLPFQAAAPLNYHYAYRLDTGDSTLTNEPSEQFANKFMQMTPFTRWRLRLSASAKENAGLAFPTATALDSTTEIAITFHVTAIRQIDWRQEEE

SEQ ID NO: 577 - protein, 866 aa, Artificial Sequence
  Synthetic
MALVDYGKLFEDLNQISMGVLDRVEFSEVMVIHRMYVRLADLNVGQLEGAEKVKRLYVFADVVELPVVEWRWPPQIPGSVTVIILCRLLQWPTDGRQSDTELHLTFMKLHAIQREENRWEITAADGMNWGVYIHAEEVQVGVLTMSWSSVLRVSALRSVITSGFRAVSVFEVPGSVRSTLGATLRPDHALYSTTMQATPNASHISAFNLRIVSPSAYRVCPLQNDTDTYLGIPADVAAVLPVDVVTDPNILLGMQTTVHIAELVKACHPSPDVVSAVGEHLNWLNKLLLPLKESTQLQGSESYKECLALLGRVHAAMKMVRIGLVVPQLQYRMYGSLINQMAQVAQNYDREFKQFKLFIIQNQILGSYLLQQNRAFAERELQMESFHAAVISQRREELDNTFAKMDRLSGQMEAESSAMEQAKKEMDEGLRQFQNRQVANALFAVLSAVAQIGLAFLTAGATAPGAAASAAQAVNIAGQAAQGLRRVVEILEGLEAVMEVVAAVKDLVDSLEQVGQIVDAPVMPELPSEADWSIFVNEVEAVAEGMPTEVSEVPAWKAKCKNVAALGREMSITAEQISQLQYDIWVQGMMRDMARSQADRLAAIQPADLTNYLEMATQMDMRTTRMLLGLLNILRIQNAALRYEYLLMPTELTTWPLGMDTVGDLLIAQENAALIGLAQLGPPSDFTSRHVVKGIPVSLLLDGGDWEFEIPVQAGMSSFPSSWTRVRIRHLEMHFVQEASGGGEIIHQPATQTGTIYILLQGSTVFHDRRREEVMTFQAAAPLNYHYAYRLDTGDSTLTNEPSEQFANTFMQMTPFTHWRLRLSASAKENAGLAFPTATALDSTTEIAITFHVTAIRQIDWRQEEE

SEQ ID NO: 578 - protein, 867 aa, Artificial Sequence
  Synthetic
MALVDYGKLFEDLNQISMGVLDRVEFSEVMVIHRMYVRLADLNVGQLEGAEKVKRLYVFADVVELPVVEWRWPPQIPGSVTVIILCRLLQWPTDGRQSDTELHLTFMKLHAIQREENRWEITAADGMNWGVYIHAEEVQVGVLTMSWSSVLRVSALRSVITSGFRAVSVFEVPGSVRSTLGATLRPDHALYSTTMQATPNASHISAFNLRIVSPSAYRVCPLQNDTDTYLGIPADVAAVLPVDVVTDPNILLGMQTTVHIAELVKACHPSPDVVSAVGEHLNWLNKLLLPLKESTQLQGSESYKECLALLGRVHAAMKMVRIGLVVPQLQYRMYGSLINQMAQVAQNYDREFKQFKLFIIQNQILGSYLLQQNRAFAERELQMESFHSAVISQRREELDNTFAKMDRLSGQMEAESSAMEQAKKEMDEGLRQFQNRQVANALFAVLSAVAQIGLAFLTAGATAPGAVASAGQAVSIAGQAAQGLRRVVEILEQLEAVMEVVAAVKDLVDSLEQVGQIVDAPVMPDMPSEADWSIFVNEVEAVAEGMPTEVSEVPVWRAKCKNVAALGREMSITAVQMSELQYDIWVQGLLRDIAQSHADRLAAIQPANLTNYLEMATQMDMRTTRMLLGLLNILRIQNAALRYEYLLMPTELTTWPLGMDTVANLLITHESAALSGLAQLGPPSDFTSRHVVKGIPVSLLLDGGDWEFEIPVQGGMSSFPSSWTRVRIRHLEMHFVQEASGIGGEIIHQPTTQTGTVYILLQGSTTFHDRRRDQVLPFQAAAPLNYHYAYRLDTGDSTLTNEPSEQFANKFMQMTPFTRWRLRLSASAAENKGLAFPTATAPDSTTEIAITFHVTAIRQIDWRHDEE

SEQ ID NO: 579 - protein, 867 aa, Artificial Sequence
  Synthetic
MALVDYGKLFEDLNQISMGVLDRVEFSEVMVIHRMYVRLADLNVGQLEGAEKVKRLYVFADVVELPVVEWRWPPQIPGSVTVIILCRLLQWPTDGRQSDTELHLTFMKLHAIQREENRWEITAADGMNWGVYIHAEEVQVGVLTMSWSSVLRVSALRSVITSGFRAVSVFEVPGSVRSTLGATLRPDHALYSTTMQATPNASHISAFNLRIVSPSAYRVCPLQNDTDTYLGIPADVAAVLPVDVVTDPNILLGMQTTVHIAELVKACHPSPDVVSAVGEHLNWLNKLLLPLKESTQLQGSESYKECLALLGRVHAAMKMVRIGLVVPQLQYRMYGSLINQMAQVAQNYDREFKQFKLFIIQNQILGSYLLQQNRAFAERELQMESFHSAVISQRRQELDDAIAKMDRLSLQMEEEDRAMEQARKEMEEGLKQFQNEQVARAVFAVLKSVAMIALAFVTAGATAPGAVASAGQAVSIAGQAAQGLRRVVEILEGLEAVMEVVAAVKDLVDSLEQVGQIVDAPPMPDMPSEADWSIFVNEVEAVAEGMPTEVSEVPAWKAKCKNVAALGREMCITAEQISQLQYDIWVQGMMRDMARSQADRLAAIQPADLTNYLEMAIQMDMRTTRMLLGLLNILRIQNAALRYEYLLMPTELTTWPLRMDTVANLLITHESAALSGLAQLGPPSDFTSRHVVKDIPVNLLLDGEDWEFEIPVQGGMSSFPSSWSRVRIRHLEMHFVKEASGIGGEIIHQPATQTGTVYILLQGSTVFHDRRREEVMTFQAAVPLNYHYAYRLDTGDSTLTNEPSEQFANKFMQMTPFTRWRLRLSASAKENAGLAFPTATAPDSTTEIAITFHVTAIRQIDWRHDEE

SEQ ID NO: 580 - protein, 866 aa, Artificial Sequence
  Synthetic
MALVDYGKLFEDLNQISMGVLDRVEFSEVMVIHRMYVRLADLNVGQLEGAEKVKRLYVFADVVELPVVEWRWPPQIPGSVTVIILCRLLQWPTDGRQSDTELHLTFMKLHAIQREENRWEITAADGMNWGVYIHAEEVQVGVLTMSWSSVLRVSALRSVITSGFRAVSVFEVPGSVRSTLGATLRPDHALYSTTMQATPNASHISAFNLRIVSPSAYRVCPLQNDTDTYLGIPADVAAVLPVDVVTDPNILLGMQTTVHIAELVKACHPSPDVVSAVGEHLNWLNKLLLPLKESTQLQGSESYKECLALLGRVHAAMKMVRIGLVVPQLQYRMYGSLINQMAQVAQNYDREFKQFKLFIIQNQILGSYLLQQNRAFAERELQMESFHAAVISQRREELDDAIAKMDRLSLQMEEEDRAMEQAKKEMDEGLRQFQNRQVANALFAVLSAVAQIGLAFVTAGATAPGAVASAGQAVSIAGQAAQGLRRVVEILEGLEAVMEVVAAVKDLVDSLEQVGQIVDAPVMPELPSEADWSIFVNEVEAVAEGMPTEVSEVPVWRAKCKNVAALGREMCITAEQISQLQYDIWVQGMMRDTAQSHADRLAAIQPADLTNYLEMATQMDMRTTRMLLGLLNILRIQNAALRYEYLLMPTELTTWPLGMDTVGDLLIAHESAALSGLAQLGPPSDFTSRHVVKDIPVSLLLDGEDWEFEIPVQAGMSSFPSSWSRVRIRHLEMHFVKEASGGGEIIHQPTTQTGTVYILLQGSTVFHDRRRDQVLPFQAAAPLNYHYAYRLDTGDSTLTNEPSEQFANKFMQMTPFTRWRLRLSASAKENAGLAFPTATAPDSTTEIAITFHVTAIRQIDWRHDEE

SEQ ID NO: 581 - protein, 866 aa, Artificial Sequence
  Synthetic
MALVDYGKLFEDLNQISMGVLDRVEFSEVMVIHRMYVRLADLNVGQLEGAEKVKRLYVFADVVELPVVEWRWPPQIPGSVTVIILCRLLQWPTDGRQSDTELHLTFMKLHAIQREENRWEITAADGMNWGVYIHAEEVQVGVLTMSWSSVLRVSALRSVITSGFRAVSVFEVPGSVRSTLGATLRPDHALYSTTMQATPNASHISAFNLRIVSPSAYRVCPLQNDTDTYLGIPADVAAVLPVDVVTDPNILLGMQTTVHIAELVKACHPSPDVVSAVGEHLNWLNKLLLPLKESTQLQGSESYKECLALLGRVHAAMKMVRIGLVVPQLQYRMYGSLINQMAQVAQNYDREFKQFKLFIIQNQILGSYLLQQNRAFAERELQMESFHSAVISQRRQELDDAIAKMDRLSLQMEEEDRAMEQARKEMEEGLKQFQNEQVARAVFAVLKSVAMIALAFVTAGATAPGAVASAGQAVSIAGQAAQGLRRVVEILEGLEAVMEVVAAVKDLVDSLEQVGQIVDAPVMPELPSEADWSIFVNEIEAVAEGMPTEVSEVPVWRAKCKNVAALGREMCITAEQISQLQYDIWVQGMMRDMARSQADRLAAIQPADLTNYLEMATQMDMRTTRMLLGLLNILRIQNAALRYEYLLMPTELTTWPLGMDTVGDLLIAHESAALSGLAQLGPPSDFTSRHVVKGIPVSLLLDGEDWEFEIPVQGGMSSFPSSWTRVRIRHLEMHFVQEASGGGEIIHQPTTQTGTIYILLQGSTVFHDRRRDQVLPFQAAAPLNYHYAYRLDTGEATLTNEPSEQFANKFMQTTPFTHWRLRLSASAAENKGLAFPTATAPDSTTEIAITFHVTAIRQIDWRQEEE

SEQ ID NO: 582 - protein, 866 aa, Artificial Sequence
  Synthetic
MALVDYGKLFEDLNQISMGVLDRVEFSEVMVIHRMYVRLADLNVGQLEGAEKVKRLYVFADVVELPVVEWRWPPQIPGSVTVIILCRLLQWPTDGRQSDTELHLTFMKLHAIQREENRWEITAADGMNWGVYIHAEEVQVGVLTMSWSSVLRVSALRSVITSGFRAVSVFEVPGSVRSTLGATLRPDHALYSTTMQATPNASHISAFNLRIVSPSAYRVCPLQNDTDTYLGIPADVAAVLPVDVVTDPNILLGMQTTVHIAELVKACHPSPDVVSAVGEHLNWLNKLLLPLKESTQLQGSESYKECLALLGRVHAAMKMVRIGLVVPQLQYRMYGSLINQMAQVAQNYDREFKQFKLFIIQNQILGSYLLQQNKAFADREVQMESFHAAVISQRRQELDDAIAKMDRLSLQMEEEDRAMEQARKEMEEGLKQFQNEQVARAVFAVLKSVAMIALAFVTAGATAPGAVASAGQAVSIAGQAAQGLRRVVEILEQLEAVMEVVAAVKDLVDSLEQVGQIVDAPVMPELPSEADWSIFVNEVEAVAEGMPTEVSEVPVWRAKCKNVAALGREMCITAEQISQLQYDIWVQGLLRDIARSQADRLAAIQPADLTNYLEMAIQMDMRTTRILIGLLNIMRIQNAALMYEYLLTPTQLTAWPLRMDTVANLLITHESAALSGLAQLGPPSDFTSRHVVKGIPVSLLLDGGDWEFEIPVQGGMSSFPSSWSRVRIRHLEMHFVQEASGGGEIIHQPATQTGTIYILLQGSTIFHDRRRDQVLPFQAAAPLNYHYAYRLDTGDSTLTNEPSEQFANKFMQMTPFTRWRLRLSASAAENKGLAFPTATAPDSTTEIAITFHVTAIRQIDWRQEEE

SEQ ID NO: 583 - protein, 866 aa, Artificial Sequence
  Synthetic
MALVDYGKLFEDLNQISMGVLDRVEFSEVMVIHRMYVRLADLNVGQLEGAEKVKRLYVFADVVELPVVEWRWPPQIPGSVTVIILCRLLQWPTDGRQSDTELHLTFMKLHAIQREENRWEITAADGMNWGVYIHAEEVQVGVLTMSWSSVLRVSALRSVITSGFRAVSVFEVPGSVRSTLGATLRPDHALYSTTMQATPNASHISAFNLRIVSPSAYRVCPLQNDTDTYLGIPADVAAVLPVDVVTDPNILLGMQTTVHIAELVKACHPSPDVVSAVGEHLNWLNKLLLPLKESTQLQGSESYKECLALLGRVHAAMKMVRIGLVVPQLQYRMYGSLINQMAQVAQNYDREFKQFKLFIIQNQILGSYLLQQNRAFAERELQMESFHSAVISQRRQELDDAIAKMDRLSLQMEAESSAMEQAKKEMDEGLRQFQNRQVARAVFAVLKSVAMIALAFVTAGATAPGAVASAGQAVSIAGQAAQALRRVVEILEQLEAVMEVVAAVKDLVDSLEQVGQIVDAPVMPELPSEADWSIFVNEVEAVAEGMPTEVSEVPAWKAKCKNVAALGREMSITAVQMSELQYDIWVQGMMRDMARSQADRLAAIQPADLTNYLEMATQMDMRTTRMLLGLLNILRIQNAALRYEYLLMPTELTTWPLGMDTVGDLLIAQENAALIGLMQLGPSSDFTSRHVVKGIPVSLLLDGGDWEFEIPVQGGMSSFPSSWSRVRIRHLEMHFVQEASGGGEIIHQPATQTGTIYILLQGSTIFHDRRRDQVLPFQAAAPLNYHYAYRLDTGEATLTNEPSEQFANTFMQMTPFTHWRLRLSASAKENAGLAFPTATALDSTTQIVITFHVTAVRQIDWRHDEE

SEQ ID NO: 584 - protein, 867 aa, Artificial Sequence
  Synthetic
MALVDYGKLFEDLNQISMGVLDRVEFSEVMVIHRMYVRLADLNVGQLEGAEKVKRLYVFADVVELPVVEWRWPPQIPGSVTVIILCRLLQWPTDGRQSDTELHLTFMKLHAIQREENRWEITAADGMNWGVYIHAEEVQVGVLTMSWSSVLRVSALRSVITSGFRAVSVFEVPGSVRSTLGATLRPDHALYSTTMQATPNASHISAFNLRIVSPSAYRVCPLQNDTDTYLGIPADVAAVLPVDVVTDPNILLGMQTTVHIAELVKACHPSPDVVSAVGEHLNWLNKLLLPLKESTQLQGSESYKECLALLGRVHAAMKMVRIGLVVPQLQYRMYGSLINQMAQVAQNYDREFKQFKLFIIQNQILGSYLLQQNRAFADREVQMESFHSAVISQRREELDNTFAKMDRLSGQMEAESSAMEQAKKEMDEGLRQFQNRQVANALFAVLSAVAQIGLAFLTAGATAPGAVASAGQAVSIAGQAAQGLRRVVEILEQLEAVMEVVAAVKDLVDSLEQVGQIVDAPVMPELPSEADWSIFVNEVEAVAEGMPTEVSEVPVWRAKCKNVAALGREMSITAVQMSELQYVIWVQGMMRDMARSQADRLAAIQPADLTNYLEMATQMDMRTTRMLLGLLNILRIQNAALMYEYLLTPTQLTAWPLRMDTVANLLITHESAALSGLAQLGPPSDFTSRHVVKGIPVSLLLDGGDWEFEIPVQGGMSSFPSSWSRVRIRHLEMHFVKEASGIGGEIIHQPATQTGTIYILLQGSTVFHDRRRDQVLPFQAAAPLNYHYAYRLDTGDSTLTNEPSEQFANTFMQMTPFTHWRLRLSASAAENKGLAFPTATAPDSTTEIAITFHVTAIRQIDWRQEEE

SEQ ID NO: 585 - protein, 866 aa, Artificial Sequence
  Synthetic
MALVDYGKLFEDLNQISMGVLDRVEFSEVMVIHRMYVRLADLNVGQLEGAEKVKRLYVFADVVELPVVEWRWPPQIPGSVTVIILCRLLQWPTDGRQSDTELHLTFMKLHAIQREENRWEITAADGMNWGVYIHAEEVQVGVLTMSWSSVLRVSALRSVITSGFRAVSVFEVPGSVRSTLGATLRPDHALYSTTMQATPNASHISAFNLRIVSPSAYRVCPLQNDTDTYLGIPADVAAVLPVDVVTDPNILLGMQTTVHIAELVKACHPSPDVVSAVGEHLNWLNKLLLPLKESTQLQGSESYKECLALLGRVHAAMKMVRIGLVVPQLQYRMYGSLINQMAQVAQNYDREFKQFKLFIIQNQILGSYLLQQNRAFAERELQMESFHAAVISQRRQELDDAIAKMDRLSLQMEEEDRAMEQARKEMEEGLKQFQNEQVARAVFAVLKSVAMIALAFVTAGATAPGAAASAAQAVSIAGQAAQGLRRVVEILEGLEAVMEVVAAVKDLVDSLEQVGQIVDAPVMPELPSEADWSIFVNEVEAVAEGMPTEVSEVPVWRAKCKNVAALGREMCITAVQMSELQYDIWVQGMMRDMARSQADRLAAIQPADLTNYLEMATQMDMRTTRMLLGLLNILRIQNAALRYEYLLMPTELTTWPLGMDTVGDLLIAQENAALIGLMQLGPSSDFTSRHVVKGIPVSLLLDGGDWEFEIPVQGGMSSFPSSWSRVRIRHLEMHFVQEASGGGEIIHQPATQTGTIYILLQGSTVFHDRRREEVMTFQAAVPLNYHYAYRLDTGEATLTNEPSEQFANTFMQMTPFTHWRLRLSASAKENAGLAFPTATAPDSTTEIAITFHVTAIRQIDWRHDEE

SEQ ID NO: 586 - protein, 866 aa, Artificial Sequence
  Synthetic
MALVDYGKLFEDLNQISMGVLDRVEFSEVMVIHRMYVRLADLNVGQLEGAEKVKRLYVFADVVELPVVEWRWPPQIPGSVTVIILCRLLQWPTDGRQSDTELHLTFMKLHAIQREENRWEITAADGMNWGVYIHAEEVQVGVLTMSWSSVLRVSALRSVITSGFRAVSVFEVPGSVRSTLGATLRPDHALYSTTMQATPNASHISAFNLRIVSPSAYRVCPLQNDTDTYLGIPADVAAVLPVDVVTDPNILLGMQTTVHIAELVKACHPSPDVVSAVGEHLNWLNKLLLPLKESTQLQGSESYKECLALLGRVHAAMKMVRIGLVVPQLQYRMYGSLINQMAQVAQNYDREFKQFKLFIIQNQILGSYLLQQNRAFAERELQMESFHSAVISQRREELDNTFAKMDRLSGQMEAESSAMEQAKKEMDEGLRQFQNRQVANALFAVLSAVAQIGLAFLTAGATAPGAVASAGQAVSIAGQAAQGLRRVVEILEGLEAVMEVVAAIKHLVDALDQVSQIVDAPPMPDMPSEADWSIFVNEVEAVAEGMPTEVSEVPAWKAKCKNVAALGREMCITAEQISQLQYDIWVQGLLRDIAQSQADRLAAIQPADLTNYLEMATQMDMRTTRMLLGLLNILRIQNAALRYEYLLTPTQLTAWPLRMDTVANLLITHESAALSGLAQLGPPSDFTSRHVVKDIPVNLLLDGEDWEFEIPVQGGMSSFPSSWTRVRIRHLEMHFVQEASGGGEIIHQPATQTGTIYILLQGSTIFHDRRREEVMTFQAAVPLNYHYAYRLDTGDSTLTNEPSEQFANTFMQMTPFTRWRLRLSASAKENAGLAFPTATAPDSTTEIAITFHVTAIRQIDWRQEEE

SEQ ID NO: 587 - protein, 867 aa, Artificial Sequence
  Synthetic
MALVDYGKLFEDLNQISMGVLDRVEFSEVMVIHRMYVRLADLNVGQLEGAEKVKRLYVFADVVELPVVEWRWPPQIPGSVTVIILCRLLQWPTDGRQSDTELHLTFMKLHAIQREENRWEITAADGMNWGVYIHAEEVQVGVLTMSWSSVLRVSALRSVITSGFRAVSVFEVPGSVRSTLGATLRPDHALYSTTMQATPNASHISAFNLRIVSPSAYRVCPLQNDTDTYLGIPADVAAVLPVDVVTDPNILLGMQTTVHIAELVKACHPSPDVVSAVGEHLNWLNKLLLPLKESTQLQGSESYKECLALLGRVHAAMKMVRIGLVVPQLQYRMYGSLINQMAQVAQNYDREFKQFKLFIIQNQILGSYLLQQNRAFAERELQMESFHAAVISQRREELDNTFAKMDRLSGQMEEEDRAMEQAKKEMDEGLRQFQNRQVANALFAVLSAVAQIGLAFLTAGATAPGAVVSAGQAVSIAGQAAQGLRRVVEILEQLEAVMEVVAAVKDLVDSLEQVGQIVDAPVMPELPSEADWSIFVNEVEAVAEGMPTEVSEVPAWKAKCKNVAALGREMCITAEQISQLQYDIWVQGMMRDMARSQADRLAAIQPADLTNYLEMATQMDMRTTRMLLGLLNIMRIQNAALRYEYLLMPTELTTWPLGMDTVGDLLIAQENAALIGLMQLGPSSDFTSRHVVKGIPVSLLLDGGDWEFEIPVQGGMSSFPSSWTRVRIRHLEMHFVQEASGIGGEIIHQPTTQTGTVYILLQGSTIFHDRRRDQVLPFQAAAPLNYHYAYRLDTGEATLTNEPSEQFANTFMQMTPFTRWRLRLSAAAKENAGLAFPTATALDSTTQIVITFHVTAIRQIDWRHEEE

SEQ ID NO: 588 - protein, 866 aa, Artificial Sequence
  Synthetic
MALVDYGKLFEDLNQISMGVLDRVEFSEVMVIHRMYVRLADLNVGQLEGAEKVKRLYVFADVVELPVVEWRWPPQIPGSVTVIILCRLLQWPTDGRQSDTELHLTFMKLHAIQREENRWEITAADGMNWGVYIHAEEVQVGVLTMSWSSVLRVSALRSVITSGFRAVSVFEVPGSVRSTLGATLRPDHALYSTTMQATPNASHISAFNLRIVSPSAYRVCPLQNDTDTYLGIPADVAAVLPVDVVTDPNILLGMQTTVHIAELVKACHPSPDVVSAVGEHLNWLNKLLLPLKESTQLQGSESYKECLALLGRVHAAMKMVRIGLVVPQLQYRMYGSLINQMAQVAQNYDREFKQFKLFIIQNQILGSYLLQQNRAFAERELQMESFHAAVISQRREELDNTFAKMDRLSGQMEAESSAMEQAKKEMDEGLRQFQNRQVANALFAVLSAVAQIGLAFLTAGATAPGAVASAGQAVSIAGQAAQGLRRVVEILEGLEAVMEVVAAVKDLVDSLEQVGQIVDAPVMPELPSEADWSIFVNEIEAVAEGMPTEVSEVPAWRAKCKNVAALGREMSITAVQMSELQYDIWVQGMMRDMARSQADRLAAIQPADLTNYLEMAIQMDMRTTRMLLGLLNILRIQNAALRYEYLLMPTELTTWPLGMDTVGDLLIAQENAALIGLAQLGPPSDFTSRHVVKGIPVSLLLDGGDWEFEIPVQGGMSSFPSSWSRVRIRHLEMHFVQEASGGGEIIHQPATQTGTIYILLQGSTVFHDRRRDQVLPFQAAAPLNYHYAYRLDTGEATLTNEPSEQFANKFMQMTPFTHWRLRLSASAAENKGLAFPTATAPDSTTEIVITFHVTAIRQIDWRQEEE

SEQ ID NO: 589 - protein, 866 aa, Artificial Sequence
  Synthetic
MALVDYGKLFEDLNQISMGVLDRVEFSEVMVIHRMYVRLADLNVGQLEGAEKVKRLYVFADVVELPVVEWRWPPQIPGSVTVIILCRLLQWPTDGRQSDTELHLTFMKLHAIQREENRWEITAADGMNWGVYIHAEEVQVGVLTMSWSSVLRVSALRSVITSGFRAVSVFEVPGSVRSTLGATLRPDHALYSTTMQATPNASHISAFNLRIVSPSAYRVCPLQNDTDTYLGIPADVAAVLPVDVVTDPNILLGMQTTVHIAELVKACHPSPDVVSAVGEHLNWLNKLLLPLKESTQLQGSESYKECLALLGRVHAAMKMVRIGLVVPQLQYRMYGSLINQMAQVAQNYDREFKQFKLFIIQNQILGSYLLQQNRAFAERELQMESFHAAVISQRREELDNTFAKMDRLSGQMEAESSAMEQAKKEMDEGLRQFQNRQVANALFAVLSAVAQIGLAFLTAGATAPGAVASAGQAVSIAGQAAQGLRRVVEILEGLEAVMEVVAAIKHLVDALEQVGQIVDAPPMPDMPSEADWSIFVNEVEAVAEGMPTEVSEVPAWKAKCKNVAALGREMSITAVQMSELQYDIWVQGLLRDIARSQADRLAAIQPADLTNYLEMATQMDMRTTRMLLGLLNILRIQNAALRYEYLLMPTELTTWPLGMDTVGDLLITHESAALSGLAQLGPPSDFTSRHVVKGIPVSLLLDGGDWEFEIPVQGGMSSFPSSWTRVRIRHLEMHFVQEASGGGEIIHQPTTQTGTVYILLQGSTVFHDRRRDQVLPFQAAAPLNYHYAYRLDTGDSTLTNEPSEQFANKFMQMTPFTRWRLRLSASAKENAGLAFPTATAPDSTTQIVITFHVTAIRQIDWRQEEE

SEQ ID NO: 590 - protein, 866 aa, Artificial Sequence
  Synthetic
MALVDYGKLFEDLNQISMGVLDRVEFSEVMVIHRMYVRLADLNVGQLEGAEKVKRLYVFADVVELPVVEWRWPPQIPGSVTVIILCRLLQWPTDGRQSDTELHLTFMKLHAIQREENRWEITAADGMNWGVYIHAEEVQVGVLTMSWSSVLRVSALRSVITSGFRAVSVFEVPGSVRSTLGATLRPDHALYSTTMQATPNASHISAFNLRIVSPSAYRVCPLQNDTDTYLGIPADVAAVLPVDVVTDPNILLGMQTTVHIAELVKACHPSPDVVSAVGEHLNWLNKLLLPLKESTQLQGSESYKECLALLGRVHAAMKMVRIGLVVPQLQYRMYGSLINQMAQVAQNYDREFKQFKLFIIQNQILGSYLLQQNRAFAERELQMESFHAAVISQRREELDDAIAKMDRLSLQMEEEDRAMEQARKEMEEGLKQFQNEQVARAVFAVLKSVAQIGLAFVTAGATAPGAVASAGQAVSIAGQAAQGLRRVVEILEGLEAVMEVVAAVKDLVDSLEQVGQIVDAPVMPELPSEADWSIFVNEVEAVAEGMPTEVSEVPAWKAKCKNVAALGREMSITAEQMSELQYDIWVQGMMRDMARSQADRLAAIQPADLTNYLEMATQMDMRTTRMLLGLLNIMRIQNAALRYEYLLMPTELTTWPLGMDTVGDLLITHESAALSGLAQLGPPSDFTSRHVVKGIPVSLLLDGGDWEFEIPVQGGMSSFPSSWSRVRIRHLEMHFVKEASGGGEIIHQPATQTGTIYILLQGSTIFHDRRREEVMTFQAAVPLNYHYAYRLDTGDSTLTNEPSEQFANTFMQMTPFTRWRLRLSASAAENKGLAFPTATAPDSTTEIVITFHVTAIRQIDWRQEEE

SEQ ID NO: 591 - protein, 866 aa, Artificial Sequence
  Synthetic
MALVDYGKLFEDLNQISMGVLDRVEFSEVMVIHRMYVRLADLNVGQLEGAEKVKRLYVFADVVELPVVEWRWPPQIPGSVTVIILCRLLQWPTDGRQSDTELHLTFMKLHAIQREENRWEITAADGMNWGVYIHAEEVQVGVLTMSWSSVLRVSALRSVITSGFRAVSVFEVPGSVRSTLGATLRPDHALYSTTMQATPNASHISAFNLRIVSPSAYRVCPLQNDTDTYLGIPADVAAVLPVDVVTDPNILLGMQTTVHIAELVKACHPSPDVVSAVGEHLNWLNKLLLPLKESTQLQGSESYKECLALLGRVHAAMKMVRIGLVVPQLQYRMYGSLIRQMAQVAQNYDREFKQFKLFIIQNQILGSYLLQQNRAFAERELQMESFHAAVISQRRQELDDAIAKMDRLSLQMEEEDRAMEQARKEMDEGLRQFQNRQVANALFAVLSAVAQIGLAFLTAGATAPGAVASAGQAVSIAGQAAQGLRRVVEILEQLEAVMEVVAAVKDLVDSLEQVGQIVDAPVMPELPSEADWSIFVNEIEAVAEGMPTEVSEVPVWRAKCKNVAALGREMCITAVQMSELQYDIWVQGLLRDMARSQADRLAAIQPADLTNYLEMATQMDMRTTRMLLGLLNILRIQNAALRYEYLLMPTQLTAWPLRMDTVANLLITHESAALSGLAQLGPPSDFTSRHVVKGIPVSLLLDGGDWEFEIPVQGGMSSFPSSWTRVRIRHLEMHFVQEASGGGEIIHQPTTQTGTVYILLQGSTIFHDRRRDQVLPFQAAAPLNYHYAYRLDTGDSTLTNEPSEQFANKFMQMTPFTRWRLRLSASAKENAGLAFPTATALDSTTQIVITFHVTAIRQIDWRHDEE

SEQ ID NO: 592 - protein, 867 aa, Artificial Sequence
  Synthetic
MALVDYGKLFEDLNQISMGVLDRVEFSEVMVIHRMYVRLADLNVGQLEGAEKVKRLYVFADVVELPVVEWRWPPQIPGSVTVIILCRLLQWPTDGRQSDTELHLTFMKLHAIQREENRWEITAADGMNWGVYIHAEEVQVGVLTMSWSSVLRVSALRSVITSDFRAVSVFEVPGSVRSTLGATLRPDHALYSTTMQATPNASHISAFNLRIVSPSAYRVCPLQNDTDTYLGIPADVAAVLPVDVVTDPNILLGMQTTVHIAELVKACHPSPDVVSAVGEHLNWLNKLLLPLKESTQLQGSESYKECLALLGRVHAAMKMVRIGLVVPQLQYRMYGSLINQMAQVAQNYDREFKQFKLFIIQNQILGSYLLQQNRAFAEREVQMESFHSAVISQRRQELDNTFAKMDRLSLQMEEEDRAMEQARKEMEEGLKQFQNEQVARAVFAVLKSVAMIALAFVTAGATAPGAVASAGQAVSIAGQAAQALRRVVEILEGLEAVMEVVAAVKDLVDSLEQVGQIVDAPVMPELPSEADWSIFVNEVEAVAEGMPTEVSEVPAWKAKCKNVAALGREMCITAVQMSELQYDIWVQGMMRDMARSQADRLAAIQPADLTNYLEMATQMDMRTTRILIGLLNILRIQNAALMYEYLLTPTQLTAWPLRMDTVANLLITHESAALSGLAQLGPPSDFTSRHVVKDIPVNLLLDGEDWEFEIPVQAGMSSFPSSWTRVRIRHLEMHFVKEASGIGGEIIHQPATQTGTVYILLQGSTIFHDRRREEVMTFQAAVPLNYHYAYRLDTGEATLTNEPSEQFANTFMQMTPFTHWRLRLSASAAENKGLAFPTATALDSTTQIVITFHVTAIRQIDWRHDEE

SEQ ID NO: 593 - protein, 866 aa, Artificial Sequence
  Synthetic
MALVDYGKLFEDLNQISMGVLDRVEFSEVMVIHRMYVRLADLNVGQLEGAEKVKRLYVFADVVELPVVEWRWPPQIPGSVTVIILCRLLQWPTDGRQSDTELHLTFMKLHAIQREENRWEITAADGMNWGVYIHAEEVQVGVLTMSWSSVLRVSALRSVITSGFRAVSVFEVPGSVRSTLGATLRPDHALYSTTMQATPNASHISAFNLRIVSPSAYRVCPLQNDTDTYLGIPADVAAVLPVDVVTDPNILLGMQTTVHIAELVKACHPSPDVVSAVGEHLNWLNKLLLPLKESTQLQGSESYKECLALLGRVHAAMKMVRIGLVVPQLQYRMYGSLINQMAQVAQNYDREFKQFKLFIIQNQILGSYLLQQNRAFAERELQMESFHAAVISQRREELDNTFAKMDRLSGQMEEEDRAMEQARKEMEEGLKQFQNEQVARAVFAVLKSVAQIGLAFLTAGATAPGAVASAGQAVSIAGQAAQGLRRVVEILEQLEAVMEVVAAVKDLVDSLEQVGQIVDAPVMPELPSEADWSIFVNEVEAVAEGMPTEVSEVPVWKAKCKNVAALGREMSITAVQMSELQYDIWVQGMMRDMARSQADRLAAIQPADLTNYLEMAIQMDMRTTRMLLGLLNILRIQNAALRYEYLLMPTELTTWPLGMDTVANLLITHESAALSGLAQLGPSSDFSSRHVVKGIPVSLLLDGGDWEFEIPVQAGMSSFPSSWSRVRIRHLEMHFVKEASGGGEIIHQPTTQTGTIYILLQGSTVFHDRRREEVMTFQAAVPLNYHYAYRLDTGEATLTNEPSEQFANKFMQMTPFTRWRLRLSASAKENAGLAFPTATALDSTTQIVITFHVTAIRQIDWRQEEE

SEQ ID NO: 594 - protein, 866 aa, Artificial Sequence
  Synthetic
MALVDYGKLFEDLNQISMGVLDRVEFSEVMVIHRMYVRLADLNVGQLEGAEKVKRLYVFADVVELPVVEWRWPPQIPGSVTVIILCRLLQWPTDGRQSDTELHLTFMKLHAIQREENRWEITAADGMNWGVYIHAEEVQVGVLTMSWSSVLRVSALRSVITSGFRAVSVFEVPGSVRSTLGATLRPDHALYSTTMQATPNASHISAFNLRIVSPSAYRVCPLQNDTDTYLGIPADVAAVLPVDVVTDPNILLGMQTTVHIAELVKACHPSPDVVSAVGEHLNWLNKLLLPLKESTQLQGSESYKECLALLGRVHAAMKMVRIGLVVPQLQYRMYGSLINQMAQVAQNYDREFKQFKLFIIQNQILGSYLLQQNKAFADREVQMESFHAAVISQRREELDNTFAKMDRLSGQMEAESSAMEQAKKEMDEGLRQFQNEQVARAVFAVLKSVAMIALAFVTAGATAPGAVASAGQAVSIAGQAAQGLRRVVEILEGLEAVMEVVAAVKDLVDSLEQVGQIVDAPVMPELPSEADWSIFVNEVEAVAEGMPTEVSEVPAWRAKCKNVAALGREMCITAVQISQLQYDIWVQGMMRDMARSQADRLAAIQPADLTNYLEMATQMDMRTTRMLLGLLNILRIQNAALRYEYLLMPTELTTWPLGMDTVGDLLIAQENAALIGLMQLGPPSDFTSRHVVKDIPVNLLLDGEDWEFEIPVQAGMSSFPSSWSRVRIRHLEMHFVQEASGGGEIIHQPTTQTGTVYILLQGSTIFHDRRRDQVLPFQAAAPLNYHYAYRLDTGEATLTNEPSEQFANTFMQMTPFTHWRLRLSASAAENKGLAFPTATAPDSTTEIAITFHVTAIRQIDWRHDEE

SEQ ID NO: 595 - protein, 682 aa, Artificial Sequence
  Synthetic
MDYSTLYRDLNQISMPLDRVEFSEVMVIHRMYVRLADLNVGELPGAERVKRLYVLADVVTDPNILMGMQTSVHIAELVKACYPSPELVSAVGVHVNWLNEVLLRVVQKESQLQGTEAYNECLALLGRIQCVMKMGPFVSVVPQLQYRMYGSLIRQMAQVAQNYDQDFRQLKLFIAQNQILGSYLLQQNKAFADREVQMESFHSAVISQRRQELDDAIAKMDRLSLQMEEEDRAMEQARKEMEEGLKQFQNEQVARAVFAVLKSVAMIALAFVTAGATAPGAAASAAQAVSIAGQAAQGLRRVVEILEQLEAVMEVVAAVKDLVDSLEQVGQIVDAPVMPELPSEADWSIFVNEVEAVAEGMPTEVSEVPVWRAKCKNVAALGREMCITAVQMSELQYDIWVQGMMRDIAQSHADRLAAIQPANLTNYLEMATQMDMRTTRMLLGLLNILRIQNAALRYEYLLMPTELTTWPLGMDTVGDLLIAQENAALIGLMQLGPSSDFTSRHVVKGIPVSLLLDGGDWEFEIPVQGGMSSFPSSWSRVRIRHLEMHFVKEASGIGGEIIHQPTTQTGTVYILLQGSTVFHDRRREEVMTFQAAVPLNYHYAYRLDTGDSTLTNEPSEQFANTFMQMTPFTRWRLRLSASAAENKGLAFPTATAPDSTTEIAITFHVTAIRQIDWRHDEE

SEQ ID NO: 596 - protein, 855 aa, Artificial Sequence
  Synthetic
MALVDYGKLFEDLNQISMGVLDRVEFSEVMVIHRMYVRLADLNVGQLEGAEKVKRLYVFADVVELPVVEWRWPPQIPGSVTVIILCRLLQFPTDGSFAAWLELPFMELHTLIEQYRSEIKAADDAKWGTYVHAEEVQLSPLFNGWPYLVVEAQRCIITAAMHNTFNRPGWVRSITQFTTDQSGRVDTTLLARTEFGHIDLPLETDSPTAFSVSHRQSTNLPVEYTGIPVEVVTDPNILMGMQTTVHIAELVKACHPSPDVVSAVGEHLNWLNEVLLRVVQKESQLQGTEAYNECLALLGRIQCVMKMGPFVSVVPQLQYRMYGSLINQMAQVAQNYDQDFRQLKLFIAQNQILGSYLLQQNRAFADREVQMESFHSAVISQRRQELDDAIAKMDRLSLQMEEEDRAMEQAKKEMDEGLRQFQNRQVANALFAVLSAVAQIGLAFLTAGATAPGAVASAGQAVSIAGQAAQGLRRVVEILEGLEAVMEVVAAVKDLVDSLEQVGQIVDAPVMPELPSEADWSIFVNEVEAVAEGMPTEVSEVPVWKAKCKNVAALGREMSITAEQMSELQYDIWVQGLMRDMARSQADRLAAIQPADLTNYLEMATQMDMRTTRMLLGLLNIMRIQNAALRYEYLLMPTELTTWPLGMDTVGDLLIAQENAALIGLMQLGPPSDFTSRHVVKGIPVSLLLDGGDWEFEIPVQAGMSSFPSSWTRVRIRHLEMHFVKEASGIGGEIIHQPTTQTGTVYILLQGSTIFHDRRRDQVLPFQAAAPLNYHYAYRLDTGEATLTNEPSEQFANTFMQMTPFTRWRLRLSASAKENAGLAFPTATALDSTTQIVITFHVTAIRQIDWRHDEE

SEQ ID NO: 597 - protein, 853 aa, Artificial Sequence
  Synthetic
MDYSTLYRDLNQISMPLDRVEFSEVMVIHRMYVRLADLNVGQLEGAEKVKRLYVLADVVELATFAHPQLLNTRMPGSVTVIILCRLLQFPTDGSFAAWLELPFMELHTLIGQYRSEIKAADDAKWGTYVHAEEVQLSPLFNGWPYLVVEAQRCIITAAMHNTFNRPGWVRSITQFTTDQSGRVDTTLLARTEFGHIDLPLETDSPTAFSVSHRQSTNLPVEYTGIPVEVVTDPNILMGMQTSVHIAELVKACYPSPDVVSAVGVHVNWLNEVLLRVVQKESQLQGTEAYNECLALLGRIQCVMKMGPFVSVVPQLQYRMYGSLIRQMAQVAQNYDQDFRQLKLFIAQNQILGSYLLQQNKAFADREVQMESFHAAVISQRRQELDDAIAKMDRLSLQMEEEDRAMEQAKKEMDEGLRQFQNRQVANALFAVLSAVAQIGLAFLTAGATAPGAVASAGQAVSIAGQAAQGLRRVVEILEGLEAVMEVVAAVKDLVDSLEQVGQIVDAPVMPELPSEADWSIFVNEVEAVAEGMPTEVSEVPVWRAKCKNVAALGREMCITAEQISQLQYDIWVQGLLRDIAQSHADRLAAIQPANLTNYLEMAIQMDMRTTRILIGLLNIMRIQNAALMYEYLLTPTQLTAWPLRMDTVANLLITHESAALSGLAQLGPPSDFTSRHVVKGIPVSLLLDGGDWEFEIPVQGGMSSFPSSWTRVRIRHLEMHFVQEASGIGGEIIHQPTTQTGTIYILLQGSTVFHDRRREEVMTFQAAVPLNYHYAYRLDTGDSTLTNEPSEQFANTFMQVTPFTRWRLRLSASAKENAGLAFPTATALDSTTQIVITFHVTAIRQIDWRHDEE

SEQ ID NO: 598 - protein, 855 aa, Artificial Sequence
  Synthetic
MALVDYGKLFEDLNQISMPLDRVEFSEVMVIHRMYVRLADLNVGQLEGAERVKRLYVLADVVELATFAHPQLLNTRMPGSVTVIILCRLLQFPTDGSFAAWLELPFMELHTLIEQYRSEIKAADDAKWGTYVHAEEVQLSPLFNGWPYLVVEAQRCIITAAMHNTFNRPGWVRSITQFTTDQSGRVDTTLLARTEFGHIDLPLETDSPTAFSVSHRQSTNLPVEYTGIPVEVVTDPNILMGMQTSVHIAELVKACYPSPELVSAVGVHVNWLNEVLLRVVQKESQLQGTEAYNECLALLGRIQCVMKMGPFVSVVPQLQYRMYGSLINQMAQVAQNYDQDFRQLKLFIAQNQILGSYLLQQNRAFAERELQMESFHAAVISQRREELDNTFAKMDRLSLQMEEEDRAMEQAKREMDEGLRQFQNEQVARAVFAVLKSVAMIALAFVTAGATAPGAVASAGQAVSIAGQAAQGLRRVVEILEGLEAVMEVVAAIKHLVDALDQVSQIVDAPVMPELPSEADWSIFVNEVEAVAEGMPTEVSEVPVWRAKCKNVAALGREMCITAEQISQLQYDIWVQGLLRDIAQSHADRLAAIQPADLTNYLEMATQMDMRTTRMLLGLLNILRIQNAALRYEYLLMPTELTTWPLGMDTVGDLLITHESAALSGLAQLGPPSDFTSRHVVKDIPVNLLLDGEDWEFEIPVQAGMSSFPSSWTRVRIRHLEMHFVQEASGGGEIIHQPTTQTGTVYILLQGSTVFHDRRREEVMTFQAAVPLNYHYAYRLDTGDSTLTNEPSEQFANKFMQMTPFTHWRLRLSASAAENKGLAFPTATAPDSTTEIAITFHVTAIRQIDWRHDEE

SEQ ID NO: 599 - protein, 855 aa, Artificial Sequence
  Synthetic
MALVDYGKLFEDLNQISMPLDRVEFSEEMVIHRMYVRLADLNVGQLEGAEKVKRLYVLADVVELATFAHPQLLNTRMPGSVTVIILCRLLQFPTDGSFAAWLELPFMELHTLIEQYRSEIKAADDAKWGTYVHAEEVQLSPLFNGWPYLVVEAQRCIITAAMHNTFNRPGWVRSITQFTTDQSGRVDTTLLARTEFGHIDLPLETDSPTAFSVSHRQSTNLPVEYTGIPVEVVTDPNILMGMQTSVHIAELVKACYPSPELVSAVGVHVNWLNEVLLRVVQKESQLQGTEAYNECLALLGRIQCVMKMGPFVSVVPQLQYRMYGSLIRQMAQVAQNYDREFKQFKLFIIQNQILGSYLLQQNRAFAERELQMESFHSAVISQRRQELDDAIAKMDRLSLQMEAESSAMEQAKKEMDEGLRQFQNRQVANALFAVLSAVAQIGLAFLTAGATAPGAVASAGQAVSIAGQAAQGLRRVVEILEQLEAVMEVVAAVKDLVDSLEQVGQIVDAPVMPELPSEADWSIFVNEIEAVAEGMPTEVSEVPAWKAKCKNVAALGREMCITAEQISQLQYDIWVQGLLRDIAQSHADRLAAIQPANLTNYLEMAIQMDMRTTRMLPGLLNILRIQNAALRYEYLLMPTELTTWPLGMDTVGDLLIAQENAALIGLMQLGPSSDFTSRHVVKGIPVSLLLDGGDWEFEIPVQAGMSSFPSSWSRVRIRHLEMHFVQEASGGGEIIHQPATQTGTIYILLQGSTVFHDRRRDQVLPFQAAAPPNYHYAYRLDTGDSTLTNEPSEQFANTFMQMTPFTHWRLRLSASAAENKGLAFPTATALDSTTEIAITFHVTAIRQIDWRHDEE

SEQ ID NO: 600 - protein, 856 aa, Artificial Sequence
  Synthetic
MALVDYGKLFEDLNQISMGVLDRVESSEVMVIHRMYVRLADLNVGELPGAERVKRLYVLADVVELATFAHPQLLNTRMPGSVTVIILCRLLQFPTDGSFAAWLELPFMELHTLIEQYRSEIKAADDAKWGTYVHAEEVQLSPLFNGWPYLVVEAQRCIITAAMHNTFNRPGWVRSITQFTTDQSGRVDTTLLARTEFGHIDLPLETDSPTAFSVSHRQSTNLPVEYTGIPVEVVTDPNILMGMQTSVHIAELVKACYPSPELVSAVGVHVNWLNEVLLRVVQKESQLQGTEAYNECLALLGRFQCVMKMGPFVSVVPQLQYRMYGSLINQMAQVAQNYDQDFRQLKLFIAQNQILGSYLLQQNRAFAERELQMESFHAAVISQRRQELDDAIAKMDRLSLQMEAESSAMEQAKKEMDEGLRQFQNRQVANALFAVLSAVAQIALAFVTAGATAPGAVASAGQAVSIAGQAAQGLRRVVEILEGLEAVMEVVAAIKHLVDALDQVSQIVDAPPMPDMPSEADWSIFVNEIEAVAEGMPTEVSEVPVWRAKCKNVAALGREMCITAVQMSELQYDIWVQGMMRDMARSQADRLAAIQPADLTNYLEMAIQMDMRTTRMLLGLLNILRIQNAALRYEYLLMPTELTTWPLGMDTVGDLLIAQENAALIGLMQLGPSSDFTSRHVVKDIPVNLLLDGEDWEFEIPVQGGMSSFPSSWTRVRIRHLEMHFVQEASGGGEIIHQPATQTGTIYILLQGSTVFHDRRREEVMTFQAAVPLNYHYAYRLDTGEATLTDEPSEQFANKFMQMTPFTRWRLRLSASAAENKGLAFPTATAPDSTTEIAITFHVTAIRQIDWRQEEE

SEQ ID NO: 601 - protein, 853 aa, Artificial Sequence
  Synthetic
MDYSTLYRDLNQISMPLDRVEFSEVMEIHRMYVRLADLNVGQLEGAERVKRLYVFADVVELATFAHPQLLNTRMPGSATVIILCRLLQFPTDGSFAAWLELPFMELHTLIEQYRSEIKAADDAKWGTYVHAEEVQLSPLFNGWPYLVVEAQRCIITAAMHNTFNRPGWVRSITQFTTDQSGRVDTTLLARTEFGHIDLPLETDSPTAFSVSHRQSTNLPVEYTGIPVEVVTDPNILLGMQTTVHIAELVKACHPSPDVVSAVGVHVNWLNEVLLRVVQKESQLQGTEAYNECLALLGRIQCVMKMGPFVSVVPQLQYRMYGSLIRQMAQVAQNYDQDFRQLKLFIAQNQILGSYLLQQNKAFADREVQMESFHAAVISQRREELDNTFAKMDRLSGQMEEEDRAMEQARKEMEEGLRQFQNRQVANALFAVLSAVAQIGLAFLTAGATAPGAVASAGQAVSIAGQAAQGLRRVVEILEGLEAVMEVVAAIKHLVDALDQVSQIVDAPPMPDMPSEADWSIFVNEIEAVAEGMPTEVSEVPVWRAKCKNVAALGREMSITAVQMSELQYDIWVQGLLRDIAQSHADRLAAIQPANLTNYLEMATQMDMRTTRMLLGLLNIMRIQNAALMYEYLLTPTQLTAWPLRMDTVANLLITHESAALSGLAQLGPPSDFTSRHVVKGIPVSLLLDGGDWEFEIPVQAGMSSFPSSWSRVRIRHLEMHFVKEASGIGGEIIHQPATQTGTIYILLQGSTVFHDRRRDQVLPFQAAAPLNYHYAYRLDTGEATLTNEPSEQFANKFMQMTPFTRWRLRLSASAAENEGLAFPTATAPDSTTEIAITFHVTAIRQIDWRQEEE

SEQ ID NO: 602 - protein, 855 aa, Artificial Sequence
  Synthetic
MALVDYGKLFEDLNQISMPLDRVEFSEVMVIHRMYVRLADLNVGELPGAERVKRLYVLADVVELATFAHPQLLNTRMPGSVTVIILCRLLQFPTDGSFAAWLELPFMELHTLIEQYRSEIKAADDAKWGTYVHAEEVQLSPLFNGWPYLVVEAQRCIITAAMHNTFNRPGWVRSITQFTTDQSGRVDTTLLARTEFGHIDLPLETDSPTAFSVSHRQSTNLPVEYTGIPVEVVTDPNILMGMQTSVHIAELVKACYPSPDVVSAVGVHVNWLNEVLLRVVQKESQLQGTEAYNECLALLGRIQCVMKMGPFVSVVPQLQYRMYGSLIRQMAQVAQNYDQDFRQLKLFIAQNQILGSYLLQQNRAFADREVQMESFHAAVISQRREELDNTFAKMDRLSLQMEEEDRAMEQARKEMEEGLKQFQNEQVARAVFAVLKSVAMIALAFVTAGATAPGAVASAGQAVSIAGQAAQGLRRVVEILEGLEAVMEVVAAIKHLVDALDQVSQIVDAPPMPDMPSEADWSIFVNEIEAVAEGMPTEVSEVPVWKAKCKNVAALGREMCITAEQISQLQYDIWVQGMMRDMARSQADRLAAIQPADLTNYLEMATQMDMRTTRILIGLLNIMRIQNAALRYEYLLMPTELTTWPLGMDTVGDLLIAQENAALSGLAQLGPPSDFTSRHVVKDIPVSLLLDGGDWEFEIPVQGGMSSFPSSWTRVRIRHLEMHFVQEASGGGEIIHQPATQTGTIYILLQGSTVFHDRRREEVMTFQAAVPLNYHYAYRLDTGDSTLTNEPSEQFANTFMQMTPFTHWRLRLSASAKENAGLAFPTATALDSTTEIVITFHVTAIRQIDWRHEEE

SEQ ID NO: 603 - protein, 852 aa, Artificial Sequence
  Synthetic
MDYSTLYRDLNQISMPLDRVEFSEVMVIHRMYVRLADLNVGQLEGAEKVKRLYVLADVVELATFAHPQLLNTRMPGSVTVIILCRLLQFPTDGSFAAWLELPFMELHTLIEQYRSEIKAADDAKWGTYVHAEEVQLSPLFNGWPYLVVEAQRCIITAAMHNTFNRPGWVRSITQFTTDQSGRVDTTLLARTEFGHIDLPLETDSPTAFSVSHRQSTNLPVEYTGIPVEVVTDPNILMGMQTTVHIAELVKACHPSPDVVSAVGVHLNWLNEVLLRVVQKESQLQGTEAYNECLALLGRIQCVMKMGPFVSVVPQLQYRMYGSLIRQMAQVAQNYDQDFRQLKLFIAQNQILGSYLLQQNRAFADREVQMESFHSAVISQRREELDNTFAKMDRLSGQMEAESSAMEQAKKEMEEGLRQFQNRQVANALFAVLSAVAQIGLAFLTAGATAPGAVASAGQAVSIAGQAAQGLRRVVEILEGLEAVMEVVAAVKDLVDSLEQVGQIVDAPVMPELPSEADWSIFVNEVEAVAEGMPTEVSEVPVWKAKCKNVAALGREMCITAVQMSELQYDIWVQGMMRDMARSQADRLAAIQPADLTNYLEMATQMDMRTTRILIGLLNIMRIQNAALMYEYLLTPTQLTAWPLRMDTVANLLITHESAALSGLAQLGPPSDFTSRHVVKDIPVNLLLDGGDWEFEIPVQGGMSSFPSSWTRVRIRHLEMHFVQEASGGGEIIHQPATQTGTVYILLQGSTIFHDRRREEVMTFQAAVPLNYHYAYRLDTGDSTLTNEPSEQFANKFMQMTPFTRWRLRLSASAKENAGLAFPTATALDSTTEIAITFHVTAIRQIDWRQEEE

SEQ ID NO: 604 - protein, 852 aa, Artificial Sequence
  Synthetic
MDYSTLYRDLNQISMPLDRVEFSEVMVIHRMYVRLADLNVGQLEGAEKVKRLYVLADVVELATFAHPQLLNTRMPGSVTVIILCRLLQFPTDGSFAAWLELPFMELHTLIEQYRSEIKAADDAKWGTYVHAEEVQLSPLFNGWPYLVVEAQRCIITAAMHNTFNRPGWVRSITQFTTDQSGRVDTTLLARTEFGHIDLPLETDSPTAFSVSHRQSTNLPVEYTGIPVEVVTDPNILMGMQTTVHIAELVKACHPSPDVVSAVGVHVNWLNEVLLRVVQKESQLQGTEAYNECLALLGRIQCVMKMGPFVSVVPQLQYRMYGSLIRQMAQVAQNYDQDFRQLKLFIAQNQILGSYLLQQNRAFAERELQMESFHAAVISQRREELDNTFAKMDRLSGQMEAESSAMEQAKKEMDEGLRQFQNRQVANALFAVLSAVAQIGLAFLTAGATAPGAVASAGQAVSIAGQAAQGLRRVVEILEGLEAVMEVVAAIKHLVDALDQVSQIVDAPPMPDMPSEADWSIFVNEIEAVAEGMPTEVSEVPAWKAKCKNVAALGREMCITAEQISQLQYDIWVQGLLRDMARSQADRLAAIQPADLTNYLEMATQMDMRTTRMLLGLLNIMRIQNAALMYEYLLMPTQLTTWPLGMDTVGDLLIAQENAALSGLAQLGPPSDFTSRHVVKGIPVSLLLDGGDWEFEIPVQGGMSSFPSSWTRVRIRHLEMHFVQEASGGGEIIHQPTTQTGTIYILLQGSTVFHDRRRDQVLPFQAAAPLNYHYAYRLDTGEATLTNEPSEQFANKFMQMTPFTRWRLRLSASAKENAGLAFPTATAPDSTTEIAITFHVTAIRQIDWRQEEE

SEQ ID NO: 605 - protein, 852 aa, Artificial Sequence
  Synthetic
MDYSTLYRDLNQISMPLDRVEFSEVMVIHRMYVRLADLNVGELPGAERVKRLYVLADVVELATFAHPQLLNTRMPGSVTVIILCRLLQFPTDGSFAAWLELPFLELHTLIEQYRSEIKAADDAKWGTYVHAEEVQLSPLFNGWPYLVVEAQRCIITAAMHNTFNRPGWVRSITQFTTDQSGRVDTTLLARTEFGHIDLPLETDSPTAFSVSHRQSTNLPVEYTGIPVEVVTDPNILMGMQTSVHIAELVKACHPSPDVVSAVGVHVNWLNEVLLRVVQKESQLQGTEAYNECLALLGRIQCVMKMGPFVSVVPQLQYRMYGSLIRQMAQVAQNYDREFKQFKLFIIQNQILGSYLLQQNRAFADREVQMESFHSAVISQRREELDNTFAKMDRLSGQMEAESSAMEQAKKEMDEGLRQFQNRQVANALFAVLSAVAQIGLAFLTAGATAPGAVASAGQAVSIAGQAAQALRRVVEILEGLEAVMEVVAAIKHLVDSLEQVGQIVDAPVMPELPSEADWSIFVNEVEAVAEGMPTEVSEVPAWKAKCKNVAALGREMCITAEQMSELQYDIWVQGLLRDMARSQADRLAAIQPADLTNYLEMAIQMDMRTTRILIGLLNILRIQNAALRYEYLLTPTELTTWPLGMDTVGDLLITHESAALSGLAQLGPPSDFTSRHVVKGIPVSLLLDGGDWEFEIPVQGGMSSFPSSWTRVRIRHLEMHFVKEASGGGEIIHQPTTQTGTIYILLQGSTVFHDRRREEVMTFQAAVPLNYHYAYRLDTGEATLTNEPSEQFANKFMQMTPFTHWRLRLSASAAENKGLAFPTATAPDSTTEIAITFHVTAIRQIDWRQEEE

SEQ ID NO: 606 - protein, 856 aa, Artificial Sequence
  Synthetic
MALVDYGKLFEDLNQISMGVLDRVEFSEVMVIHRMYLRLSDLNVGELPGAERVKRLYVLADVVELATFAHPQLLNTRMPGSVTVIILCRLLQFPTDGSFAAWLELPFMELHTLIEQYRSEIKAADDAKWGTYVHAEEVQLSPLFNGWPYLVVEAQRCIITAAMHNTFNRPGWVRSITQFTTDQSGRVDTTLLARTEFGHIDLPLETDSPTAFSVSHRQSTNLPVEYTGIPVEVVTDPNILMGMQTSVHIAELVKACYPSPDVVSAVGEHLNWLNEVLLRVVQKESQLQGTEAYNECLALLGRIQCVMKMVRIGLVVPQLQYRMYGSLIRQMAQVAQNYDQDFRQLKLFIAQNQILGSYLLQQNKAFAERELQMESFHAAVISQRREELDNTFAKMDRLSGQMEAESSAMEQAKKEMDEGLRQFQNEQVARAVFAVLKSVAMIALAFVTAGATAPGAVASAGQAVNIAGQAAQALRRVVEILEGLEAVMEVVAAVKDLVDSLEQVGQIVDAPVMPELPSEADWSIFVNEIEAVAEGMPAEVSEVPAWKAKCKNVAALGREMCITAVQMSELQYDIWVQGMMRDMARSQADRLAAIQPADLTNYLEMATQMDMRTTRMLLGLLNILRIQNAALRYEYLLMPTELTTWPLGMDTVGDLLIAQENAALIGLMQLGPSSDFTSRHVVKGIPVSLLLDGGDWEFEIPVQGGMSSFPSSWSRVRIRHLEMHFVQEASGGGEIIHQPATQTGTIYILLQGSTVFHDRRREEVMTFQAAVPLNYHYAYRLDTGEATLTNEPSEQFANTFMQMTPFTHWRLRLSASAKENAGLAFPTATALDSTTQIVITFHVTAIRQIDWRQEEE

SEQ ID NO: 607 - protein, 857 aa, Artificial Sequence
  Synthetic
MALVDYGKLFEDLNQISMGVLDRVEFSEVMVIHRMYVRLADLNVGELPGAERVKRLYVLADVVELATFAHPQLLNTRMPGSVTVIILCRLLQFPTDGSFAAWLELPFMELHTLIEQYRSEIKAADDAKWGTYVHAEEVQLSPLFNGWPYLVVEAQRCIITAAMHNTFNRPGWVRSITQFTTDQSGRVDTTLLARTEFGHIDLPLETDSPTAFSVSHRQSTNLPVEYTGIPVEVVTDPNILMGMQTSVHIAELVKACYPSPELVSAVGVHVNWLNEVLLRVVQKESQLQGTEAYNECLALLGRIQCVMKMGPFVSVVPQLQYRMYGSLIRQMAQVAQNYDQDFRQLKLFIAQNQILGSYLLQQNRAFAERELQMESFHAAVISQRREELDNTFAKMDRLSGQMEAESSAMEQAKREMDEGLRQFQNRQVANALFAVLSAVAQIGLAFVTAGATAPGAVASAGQAVSIAGQAAQGLRRVVEILEQLEAVMEVVAAVKDLVDSLEQVGQIVDAPVMPELPSEADWSIFVNEVEAVAEGMPTEVSEVPVWRAKCKNVAALGREMSITAVQISQLQYDIWVQGLLRDIAQSHADRLAAIQPANLTNYLEMAIQMDMRTTRILIGLLNIMRIQNAALMYEYLLTPTQLTAWPLRMDTVANLLITHESAALSGLAQLGPPSDFTSRHVVKGIPVSLLLDGGDWEFEIPVQGGMSSFPSSWTRVRIRHLEMHFVQEASGIGGEIIHQPTTQTGTIYILLQGSTVFHDRRREEVMTFQAAVPLNYHYAYRLDTGEATLTNEPSEQFANTFMQMTPFTHWRLRLSASAAENKGLAFPTATAPDSTTEIAITFHVTAIRQIDWRHDEE

SEQ ID NO: 608 - DNA, 60 bp, Artificial Sequence
  Synthetic
cgaaatctctcatctaagaggctggatcctaggatggattacagcacgctttacagggac

SEQ ID NO: 609 - DNA, 60 bp, Artificial Sequence
  Synthetic
ttaagttggccaatccagaagatggacaagtctagactactcctcctcttgccgccagtc

SEQ ID NO: 610 - DNA, 60 bp, Artificial Sequence; identical to SEQ ID NO: 608
  Synthetic

SEQ ID NO: 611 - DNA, 23 bp, Artificial Sequence
  Synthetic
caaggattgcattgctaggaagg

SEQ ID NO: 612 - DNA, 60 bp, Artificial Sequence; identical to SEQ ID NO: 609
  Synthetic

SEQ ID NO: 613 - DNA, 23 bp, Artificial Sequence
  Synthetic
ccttcctagcaatgcaatccttg

SEQ ID NO: 614 - DNA, 60 bp, Artificial Sequence; identical to SEQ ID NO: 608
  Synthetic

SEQ ID NO: 615 - DNA, 60 bp, Artificial Sequence
  Synthetic
aagttggccaatccagaagatggacaagtctagactactcctcctctttctcctcctgcc

SEQ ID NO: 616 - DNA, 59 bp, Artificial Sequence
  Synthetic
cgaaatctctcatctaagaggctggatcctaggatggccagtgtactggattacagcac

SEQ ID NO: 617 - DNA, 56 bp, Artificial Sequence
  Synthetic
ttaagttggccaatccagaagatggacaagtctagactactcctcctcgtgccgcc

SEQ ID NO: 618 - DNA, 60 bp, Artificial Sequence
  Synthetic
gaaatctctcatctaagaggctggatcctaggatggattacagcactctttacagggatc

SEQ ID NO: 619 - DNA, 60 bp, Artificial Sequence; identical to SEQ ID NO: 609
  Synthetic

SEQ ID NO: 620 - DNA, 60 bp, Artificial Sequence; identical to SEQ ID NO: 608
  Synthetic

SEQ ID NO: 621 - DNA, 55 bp, Artificial Sequence
  Synthetic
gttggccaatccagaagatggacaagtctagattagagtggcttcgccagtgtcg

SEQ ID NO: 622 - DNA, 60 bp, Artificial Sequence; identical to SEQ ID NO: 608
  Synthetic

SEQ ID NO: 623 - DNA, 60 bp, Artificial Sequence; identical to SEQ ID NO: 615
  Synthetic

SEQ ID NO: 624 - DNA, 60 bp, Artificial Sequence; identical to SEQ ID NO: 608
  Synthetic

SEQ ID NO: 625 - DNA, 60 bp, Artificial Sequence; identical to SEQ ID NO: 615
  Synthetic

SEQ ID NO: 626 - DNA, 26 bp, Artificial Sequence
  Synthetic
gcctttatcgactcctaattcacacc

SEQ ID NO: 627 - DNA, 22 bp, Artificial Sequence
  Synthetic
ccacattgtgcattacgaccac

SEQ ID NO: 628 - DNA, 26 bp, Artificial Sequence
  Synthetic
ccagtgatttgagttccttcattatg

SEQ ID NO: 629 - DNA, 24 bp, Artificial Sequence
  Synthetic
gaacagtacattgactgcatgtgc

SEQ ID NO: 630 - DNA, 51 bp, Artificial Sequence; identical to SEQ ID NO: 162
  Synthetic

SEQ ID NO: 631 - DNA, 23 bp, Artificial Sequence
  Synthetic
gcagccacaacctccatcacagc

SEQ ID NO: 632 - DNA, 52 bp, Artificial Sequence; identical to SEQ ID NO: 163
  Synthetic

SEQ ID NO: 633 - DNA, 23 bp, Artificial Sequence
  Synthetic
gctgtgatggaggttgtggctgc

SEQ ID NO: 634 - DNA, 2601 bp, Artificial Sequence
  Synthetic
atggctctcgtggattacggcaagcttttcgaggatctgaaccagataagcatgggtgtactggatcgggtagagttttcagaggtgatggtgatccacaggatgtatgtgaggctagctgatctgaatgtggggcagctcgagggagccgagaaagtgaagcggttgtatgtgtttgcggacgtggtggagctaccagtcgtggaatggcggtggccgccgcaaataccaggatcggtgacggtgatcatattgtgtcgtcttcttcaatggccaactgatgggaggcagtcggacaccgagctccacctgacattcatgaagttgcatgccatacaacgagaggaaaatcggtgggagataaccgcagcagatggcatgaactggggagtttacatacacgcagaggaagtacaggttggcgtgctgacaatgtcatggtcttcggtacttagagtttcggcacttcgctctgttataacctccggctttcgcgccgttagtgtgtttgaggtaccgggaagtgtaaggtccacccttggagctactttaaggcccgatcacgccttatatagtacaactatgcaagccacacccaacgcatcgcatattagtgcttttaaccttcgcatagtttccccgtcggcatatcgtgtttgtcctctccaaaatgacacagatacctacttaggtattccagcagacgtggcggcagttcttccagtagacgtggtgactgatcctaacatcttgctgggcatgcagacaacggtacacattgcggagctagtcaaggcatgtcatccgtcacccgatgttgtgagcgctgtaggggagcacctgaactggctcaacaaactcttactcccacttaaggaatcgactcagttgcaaggaagcgagtcgtacaaggagtgccttgcactcttgggtcgtgttcacgctgcgatgaagatggtgagaattggcttagtagtgccccagctgcaatatcgcatgtacaaagatctcattgatcgaatggtgcaagtggctcagagctacgaccaagacttcaagcagttgaagctgttcgtggaacaaaataagatacttgggagctatttgctagagcaaaacaaggcgtttgctgagaaggaaaaagacatggatgcttttcactcccaagtcattgatctcaggacttctgagcttgaaagcaccattgagagaatggatgacttaagcaaacaaatggaagaacaaaatgcagcaatggagcaagccaaagcggacatggacgcagggttgatagcgtatcaaaacaaacaagtcgcaaatgccgtctttgcggtcttgggggcgatcgccagtattggtctggcatttgcaactggcggggcaactgctcctggagccgtggcttccgcggggcaagctgtgagcatagcaggtcaggcggcgcaaggtctgcgaagggtggtggaaattctagagcagctggaggctgtgatggaggttgtggctgctgtgaaggacctcgtggattcattggaacaggtaggtcagattgtggacgcaccggtgatgccggaattgccctcagaggcggactggtccatttttgtgaacgaggtggaggccgtggcagagggcatgccaacggaagtctcggaggttccggtgtggagggccaagtgcaagaatgtggctgcactgggtcgggagatgagcatcacggcagtacagatgtcggagctgcagtatgacatctgggtgcaaggcatgatgcgggatatggctcgaagccaggcagacaggctggccgcaattcaacccgcggaccttaccaactatttggagatggctacccagatggatatgcggactacgaggatgctgctggggctcctcaacatattgcgcatccagaatgcggcgctcaggtacgagtatcttctaatgcccacggagctcacaacatggccactgggtatggataccgtgggtgacttgctcatcgcgcaggagaatgctgcactgataggattaatgcagctagggccctcatctgatttcacgagcaggcatgtggtgaaagacatacctgtgaacttgctgctcgatggcgaggattgggagtttgagattcctgtgcaagctggcatgtccagcttcccttccagctggtctcgcgtccgtattcggcacctggagatgcactttgtgaaggaggccagcggtattggtggtgagattatccaccagcctaccacccagactgggaccgtttacatccttctgcagggttccactatcttccatgaccgcagaagagaccaggtgttgccttttcaggccgctgctccgctcaactaccattacgcgtaccgcctcgacaccggcgactccactctcacaaacgaaccctctgaacagtttgccaacaagttcatgcagatgacacccttcacccgttggaggcttcgtctgtctgcgtccgcaaaagagaatgcaggattagcctttcccacggctacagcacttgactccactacccagattgtcatcactttccatgttacggccatcagacaaattgactggcggcacgacgaagag

SEQ ID NO: 635 - DNA, 2601 bp, Artificial Sequence
  Synthetic
atggctctcgtggattacggcaagcttttcgaggatctgaaccagataagcatgggtgtactggatcgggtagagttttcagaggtgatggtgatccacaggatgtatgtgaggctagctgatctgaatgtggggcagctcgagggagccgagaaagtgaagcggttgtatgtgtttgcggacgtggtggagctaccagtcgtggaatggcggtggccgccgcaaataccaggatcggtgacggtgatcatattgtgtcgtcttcttcaatggccaactgatgggaggcagtcggacaccgagctccacctgacattcatgaagttgcatgccatacaacgagaggaaaatcggtgggagataaccgcagcagatggcatgaactggggagtttacatacacgcagaggaagtacaggttggcgtgctgacaatgtcatggtcttcggtacttagagtttcggcacttcgctctgttataacctccggctttcgcgccgttagtgtgtttgaggtaccgggaagtgtaaggtccacccttggagctactttaaggcccgatcacgccttatatagtacaactatgcaagccacacccaacgcatcgcatattagtgcttttaaccttcgcatagtttccccgtcggcatatcgtgtttgtcctctccaaaatgacacagatacctacttaggtattccagcagacgtggcggcagttcttccagtagacgtggtgactgatcctaacatcttgctgggcatgcagacaacggtacacattgcggagctagtcaaggcatgtcatccgtcacccgatgttgtgagcgctgtaggggagcacctgaactggctcaacaaactcttactcccacttaaggaatcgactcagttgcaaggaagcgagtcgtacaaggagtgccttgcactcttgggtcgtgttcacgctgcgatgaagatggtgagaattggcttagtagtgccccagctgcaatacagaatgtacggtagcctcatcaaccaaatggcccaagtagcacaaaactacgaccgagaattcaagcaattcaaattattcatcatccaaaatcaaatccttggcagctatttgctgcagcagaacagggcatttgctgagagggagctgcagatggagagctttcatgctgctgtcatttctcaaagaagggaggagttggacaatacattcgcaaagatggaccgattgagcgggcaaatggaggcagagagtagtgcaatggagcaagccaaaaaggaaatggacgaaggattgaggcagttccagaataggcaagttgcgaacgccctctttgccgttcttagcgctgtagctcagattgggcttgcattccttacggctggtgcaacggctcctggagccgtggcttccgcaggagcagctgttaccgcagctgggaaggcagctgagggattgaagaaagtggtagagattcttgaaggcttacaagcggtgatggaggtcgtcgctgtcataaaagagctggtacagtccttacaggagatagggcagcttgtggatgcccctgagatgccagatctgccgtcggatgcagaatgggagatttttgtgaatgaagtggaggcagtagcagagcagatgccaacagaggtgacagaggtgcctgcttggaaggccaagtgcaagaatgtggcagcactaggccgagaaatgagcactatggcggcgcacattgcagagttgcagttcgagatacaagtgcaagaaatgttgcgcgagatcgcgaagaaacaggcagataggctgtcgtccatcaagcccgcagacttgacgaactatttggagatggctacccagatggatatgcggactacgaggatgctgctggggctcctcaacatattgcgcatccagaatgcggcgctcaggtacgagtatcttctaatgcccacggagctcacaacatggccactgggtatggataccgtgggtgacttgctcatcgcgcaggagaatgctgcactgataggattaatgcagctagggccctcatctgatttcacgagcaggcatgtggtgaaagacatacctgtgaacttgctgctcgatggcgaggattgggagtttgagattcctgtgcaagctggcatgtccagcttcccttccagctggtctcgcgtccgtattcggcacctggagatgcactttgtgaaggaggccagcggtattggtggtgagattatccaccagcctaccacccagactgggaccgtttacatccttctgcagggttccactatcttccatgaccgcagaagagaccaggtgttgccttttcaggccgctgctccgctcaactaccattacgcgtaccgcctcgacaccggcgactccactctcacaaacgaaccctctgaacagtttgccaacaagttcatgcagatgacacccttcacccgttggaggcttcgtctgtctgcgtccgcaaaagagaatgcaggattagcctttcccacggctacagcacttgactccactacccagattgtcatcactttccatgttacggccatcagacaaattgactggcggcacgacgaagag

SEQ ID NO: 636 - DNA, 2601 bp, Artificial Sequence
  Synthetic
atggctctcgtggattacggcaagcttttcgaggatctgaaccagataagcatgggtgtactggatcgggtagagttttcagaggtgatggtgatccacaggatgtatgtgaggctagctgatctgaatgtggggcagctcgagggagccgagaaagtgaagcggttgtatgtgtttgcggacgtggtggagctaccagtcgtggaatggcggtggccgccgcaaataccaggatcggtgacggtgatcatattgtgtcgtcttcttcaatggccaactgatgggaggcagtcggacaccgagctccacctgacattcatgaagttgcatgccatacaacgagaggaaaatcggtgggagataaccgcagcagatggcatgaactggggagtttacatacacgcagaggaagtacaggttggcgtgctgacaatgtcatggtcttcggtacttagagtttcggcacttcgctctgttataacctccggctttcgcgccgttagtgtgtttgaggtaccgggaagtgtaaggtccacccttggagctactttaaggcccgatcacgccttatatagtacaactatgcaagccacacccaacgcatcgcatattagtgcttttaaccttcgcatagtttccccgtcggcatatcgtgtttgtcctctccaaaatgacacagatacctacttaggtattccagcagacgtggcggcagttcttccagtagacgtggtgactgatcctaacatcttgctgggcatgcagacaacggtacacattgcggagctagtcaaggcatgtcatccgtcacccgatgttgtgagcgctgtaggggagcacctgaactggctcaacaaactcttactcccacttaaggaatcgactcagttgcaaggaagcgagtcgtacaaggagtgccttgcactcttgggtcgtgttcacgctgcgatgaagatggtgagaattggcttagtagtgccccagctgcaatacagaatgtacggtagcctcatcaaccaaatggcccaagtagcacaaaactacgaccgagaattcaagcaattcaaattattcatcatccaaaatcaaatccttggcagctatttgctgcagcagaacagggcatttgctgagagggagctgcagatggagagctttcatgctgctgtcatttctcaaagaagggaggagttggacaatacattcgcaaagatggaccgattgagcgggcaaatggaggcagagagtagtgcaatggagcaagccaaaaaggaaatggacgaaggattgaggcagttccagaataggcaagttgcgaacgccctctttgccgttcttagcgctgtagctcagattgggcttgcattccttacggctggtgcaacggctcctggagctgtggcgtcggcggggcaagctgtgagcatagcaggtcaggcggcgcaaggtctgcgaagggtggtggaaattctagagcagctggaggctgtgatggaggttgtggctgctgtgaaggacctcgtggattcattggaacaggtaggtcagattgtggacgcaccggtgatgccggaattgccctcagaggcggactggtccatttttgtgaacgaggtggaggccgtggcagagggcatgccaacggaagtctcggaggttccggtgtggagggccaagtgcaagaatgtggctgcactgggtcgggagatgagcatcacggcagtacagatgtcggagctgcagtatgacatctgggtgcaaggcatgatgcgggatatggctcgaagccaggcagacaggctggccgcaattcaacccgcagacttgacgaactacttggagatggtgtccgaaatggacatgcgcacaacgcgcatgctgttggagctgattcgagtgctgtacatccagaacgcagcattgcagtacgaatatctgcagacaccggcgccattgaatgcatggccagtgacgatgcaaacggtgtgggggttgcttgtgcaacaagagacggccgcaattaacgggctgctgcagatgggggcgccctcggactacacacaagagtatgcggtgagagatgttcctgtgaggttgttactagggggtggagactgggagtttgagattcctgtgcaagctggcatgtccagcttcccttccagctggtctcgcgtccgtattcggcacctggagatgcactttgtgaaggaggccagcggtattggtggtgagattatccaccagcctaccacccagactgggaccgtttacatccttctgcagggttccactatcttccatgaccgcagaagagaccaggtgttgccttttcaggccgctgctccgctcaactaccattacgcgtaccgcctcgacaccggcgactccactctcacaaacgaaccctctgaacagtttgccaacaagttcatgcagatgacacccttcacccgttggaggcttcgtctgtctgcgtccgcaaaagagaatgcaggattagcctttcccacggctacagcacttgactccactacccagattgtcatcactttccatgttacggccatcagacaaattgactggcggcacgacgaagag

SEQ ID NO: 637 - DNA, 2604 bp, Artificial Sequence
  Synthetic
atggctctcgtggattacggcaagcttttcgaggatctgaaccagataagcatgggtgtactggatcgggtagagttttcagaggtgatggtgatccacaggatgtatgtgaggctagctgatctgaatgtggggcagctcgagggagccgagaaagtgaagcggttgtatgtgtttgcggacgtggtggagctaccagtcgtggaatggcggtggccgccgcaaataccaggatcggtgacggtgatcatattgtgtcgtcttcttcaatggccaactgatgggaggcagtcggacaccgagctccacctgacattcatgaagttgcatgccatacaacgagaggaaaatcggtgggagataaccgcagcagatggcatgaactggggagtttacatacacgcagaggaagtacaggttggcgtgctgacaatgtcatggtcttcggtacttagagtttcggcacttcgctctgttataacctccggctttcgcgccgttagtgtgtttgaggtaccgggaagtgtaaggtccacccttggagctactttaaggcccgatcacgccttatatagtacaactatgcaagccacacccaacgcatcgcatattagtgcttttaaccttcgcatagtttccccgtcggcatatcgtgtttgtcctctccaaaatgacacagatacctacttaggtattccagcagacgtggcggcagttcttccagtagacgtggtgactgatcctaacatcttgctgggcatgcagacaacggtacacattgcggagctagtcaaggcatgtcatccgtcacccgatgttgtgagcgctgtaggggagcacctgaactggctcaacaaactcttactcccacttaaggaatcgactcagttgcaaggaagcgagtcgtacaaggagtgccttgcactcttgggtcgtgttcacgctgcgatgaagatggtgagaattggcttagtagtgccccagctgcaatacagaatgtacggtagcctcatcaaccaaatggcccaagtagcacaaaactacgaccgagaattcaagcaattcaaattattcatcatccaaaatcaaatccttggcagctatttgctgcagcagaacagggcatttgctgagagggagctgcagatggagagctttcatgctgctgtcatttctcaaagaagggaggagttggacaatacattcgcaaagatggaccgattgagcgggcaaatggaggcagagagtagtgcaatggagcaagccaaaaaggaaatggacgaaggattgaggcagttccagaataggcaagttgcgaacgccctctttgccgttcttagcgctgtagctcagattgggcttgcattccttacggctggtgcaacggctcctggagctgtggcgtcggcggggcaagctgtgagcatagcaggtcaggcggcgcaaggtctgcgaagggtggtggaaattctagagcagctggaggctgtgatggaggttgtggctgctgtgaaggacctcgtggattcattggaacaggtaggtcagattgtggacgcaccggtgatgccggaattgccctcagaggcggactggtccatttttgtgaacgaggtggaggccgtggcagagggcatgccaacggaagtctcggaggttccggtgtggagggccaagtgcaagaatgtggctgcactgggtcgggagatgagcatcacggcagtacagatgtcggagctgcagtatgacatctgggtgcaaggcatgatgcgggatatggctcgaagccaggcagacaggctggccgcaattcaacccgcggaccttaccaactatttggagatggctacccagatggatatgcggactacgaggatgctgctggggctcctcaacatattgcgcatccagaatgcggcgctcaggtacgagtatcttctaatgcccacggagctcacaacatggccactgggtatggataccgtgggtgacttgctcatcgcgcaggagaatgctgcactgataggattaatgcagctagggccctcatctgatttcacgagcaggcatgtggtgaaagacatacctgtgaacttgctgctcgatggcgaggattgggagtttgagattcctgtgcaagctggcatgtccagcttcccttccagctggtctcgcgtccgtattcggcacctggagatgcactttgtgaaggaggccagcggtattggtggtgagattatccaccagcccgtcacaagcacgggggaagtgtacatgctgctgcagagttctcgcttcttcgaggatcgcgccaagcgtgagaacgagttcattagctacgagggcggcatgggccttcagtatcagtatgcctaccgcttggccacgggcgacgccaccgtcaccaacgtccccagcgaggagtatgccaatacttttatgcgcctcgcacccttcactcgttggcgcctccgcctttcggcctccgcgcccgagaacaagggcctcgcatttccaaccgccaccttggccgatgccaccacacgaatcaaaatcacctttcacgtctctgccattcgccgtataagcaccagagtcgccgta

SEQ ID NO: 638 - DNA, 2598 bp, Artificial Sequence
  Synthetic
atggctctcgtggattacggcaagcttttcgaggatctgaaccagataagcatgggtgtactggatcgggtagagttttcagaggtgatggtgatccacaggatgtatgtgaggctagctgatctgaatgtggggcagctcgagggagccgagaaagtgaagcggttgtatgtgtttgcggacgtggtggagctaccagtcgtggaatggcggtggccgccgcaaataccaggatcggtgacggtgatcatattgtgtcgtcttcttcaatggccaactgatgggaggcagtcggacaccgagctccacctgacattcatgaagttgcatgccatacaacgagaggaaaatcggtgggagataaccgcagcagatggcatgaactggggagtttacatacacgcagaggaagtacaggttggcgtgctgacaatgtcatggtcttcggtacttagagtttcggcacttcgctctgttataacctccggctttcgcgccgttagtgtgtttgaggtaccgggaagtgtaaggtccacccttggagctactttaaggcccgatcacgccttatatagtacaactatgcaagccacacccaacgcatcgcatattagtgcttttaaccttcgcatagtttccccgtcggcatatcgtgtttgtcctctccaaaatgacacagatacctacttaggtattccagcagacgtggcggcagttcttccagtagacgtggtgactgatcctaacatcttgctgggcatgcagacaacggtacacattgcggagctagtcaaggcatgtcatccgtcacccgatgttgtgagcgctgtaggggagcacctgaactggctcaacaaactcttactcccacttaaggaatcgactcagttgcaaggaagcgagtcgtacaaggagtgccttgcactcttgggtcgtgttcacgctgcgatgaagatggtgagaattggcttagtagtgccccagctgcaatacagaatgtacggtagcctcatcaaccaaatggcccaagtagcacaaaactacgaccgagaattcaagcaattcaaattattcatcatccaaaatcaaatccttggcagctatttgctgcagcagaacagggcatttgctgagagggagctgcagatggagagctttcatgctgctgtcatttctcaaagaagggaggagttggacaatacattcgcaaagatggaccgattgagcgggcaaatggaggcagagagtagtgcaatggagcaagccaaaaaggaaatggacgaaggattgaggcagttccagaataggcaagttgcgaacgccctctttgccgttcttagcgctgtagctcagattgggcttgcattccttacggctggtgcaacggctcctggagctgtggcgtcggcggggcaagctgtgagcatagcaggtcaggcggcgcaaggtctgcgaagggtggtggaaattctagagcagctggaggctgtgatggaggttgtggctgctgtgaaggacctcgtggattcattggaacaggtaggtcagattgtggacgcaccggtgatgccggaattgccctcagaggcggactggtccatttttgtgaacgaggtggaggccgtggcagagggcatgccaacggaagtctcggaggttccggtgtggagggccaagtgcaagaatgtggctgcactgggtcgggagatgagcatcacggcagtacagatgtcggagctgcagtatgacatctgggtgcaaggcatgatgcgggatatggctcgaagccaggcagacaggctggccgcaattcaacccgcggaccttaccaactatttggagatggctacccagatggatatgcggactacgaggatgctgctggggctcctcaacatattgcgcatccagaatgcggcgctcaggtacgagtatcttctaatgcccacggagctcacaacatggccactgggtatggataccgtgggtgacttgctcatcgcgcaggagaatgctgcactgataggattaatgcagctagggccctcatctgatttcacgagcaggcatgtggtgaaagacatacctgtgaacttgctgctcgatggcgaggattgggagtttgagattcctgtgcaagctggcatgtccagcttcccttccagctggtctcgcgtccgtattcggcacctggagatgcactttgtgaaggaggccagcggtattggtggtgagattatccaccagcctaccacccagactgggaccgtttacatccttctgcagggttccactatcttccatgaccgcagaagagaccaggtgttgccttttcaggccgctgctccgctcaactaccattacgcgtaccgcctcgacaccggcgactccactctcacaaacgaaccctctgaacagtttgccaacaagttcatgcagatgacacccttcactcgttggcgcctccgcctttcggcctccgcgcccgagaacaagggcctcgcatttccaaccgccaccttggccgatgccaccacacgaatcaaaatcacctttcacgtctctgccattcgccgtataagcaccagagtcgccgta

SEQ ID NO: 639 - DNA, 2601 bp, Artificial Sequence
  Synthetic
atggctctcgtggattacggcaagcttttcgaggatctgaaccagataagcatgggtgtactggatcgggtagagttttcagaggtgatggtgatccacaggatgtatgtgaggctagctgatctgaatgtggggcagctcgagggagccgagaaagtgaagcggttgtatgtgtttgcggacgtggtggagctaccagtcgtggaatggcggtggccgccgcaaataccaggatcggtgacggtgatcatattgtgtcgtcttcttcaatggccaactgatgggaggcagtcggacaccgagctccacctgacattcatgaagttgcatgccatacaacgagaggaaaatcggtgggagataaccgcagcagatggcatgaactggggagtttacatacacgcagaggaagtacaggttggcgtgctgacaatgtcatggtcttcggtacttagagtttcggcacttcgctctgttataacctccggctttcgcgccgttagtgtgtttgaggtaccgggaagtgtaaggtccacccttggagctactttaaggcccgatcacgccttatatagtacaactatgcaagccacacccaacgcatcgcatattagtgcttttaaccttcgcatagtttccccgtcggcatatcgtgtttgtcctctccaaaatgacacagatacctacttaggtattccagcagacgtggcggcagttcttccagtagacgtggtgactgatcctaacatcttgctgggcatgcagacaacggtacacattgcggagctagtcaaggcatgtcatccgtcacccgatgttgtgagcgctgtaggggagcacctgaactggctcaacaaactcttactcccacttaaggaatcgactcagttgcaaggaagcgagtcgtacaaggagtgccttgcactcttgggtcgtgttcacgctgcgatgaagatggtgagaattggcttagtagtgccccagctgcaatatcgcatgtacaaagatctcattgatcgaatggtgcaagtggctcagagctacgaccaagacttcaagcagttgaagctgttcgtggaacaaaataagatacttgggagctatttgctagagcaaaacaaggcgtttgctgagaaggaaaaagacatggatgcttttcactcccaagtcattgatctcaggacttctgagcttgaaagcaccattgagagaatggatgacttaagcaaacaaatggaagaacaaaatgcagcaatggagcaagccaaagcggacatggacgcagggttgatagcgtatcaaaacaaacaagtcgcaaatgccgtctttgcggtcttgggggcgatcgccagtattggtctggcatttgcaactggcggggcaactgctcctggagccgtggcttccgcaggagcagctgttaccgcagctgggaaggcagctgagggattgaagaaagtggtagagattcttgaaggcttacaagcggtgatggaggtcgtcgctgtcataaaagagctggtacagtccttacaggagatagggcagcttgtggatgcccctgagatgccagatctgccgtcggatgcagaatgggagatttttgtgaatgaagtggaggcagtagcagagcagatgccaacagaggtgacagaggtgcctgcttggaaggccaagtgcaagaatgtggcagcactaggccgagaaatgagcactatggcggcgcacattgcagagttgcagttcgagatacaagtgcaagaaatgttgcgcgagatcgcgaagaaacaggcagataggctgtcgtccatcaagcccgcagacttgacgaactacttggagatggtgtccgaaatggacatgcgcacaacgcgcatgctgttggagctgattcgagtgctgtacatccagaacgcagcattgcagtacgaatatctgcagacaccggcgccattgaatgcatggccagtgacgatgcaaacggtgtgggggttgcttgtgcaacaagagacggccgcaattaacgggctgctgcagatgggggcgccctcggactacacacaagagtatgcggtgagagatgttcctgtgaggttgttactagggggtggagactgggagtttgagattcctgtgcaagctggcatgtccagcttcccttccagctggtctcgcgtccgtattcggcacctggagatgcactttgtgaaggaggccagcggtattggtggtgagattatccaccagcctaccacccagactgggaccgtttacatccttctgcagggttccactatcttccatgaccgcagaagagaccaggtgttgccttttcaggccgctgctccgctcaactaccattacgcgtaccgcctcgacaccggcgactccactctcacaaacgaaccctctgaacagtttgccaacaagttcatgcagatgacacccttcacccgttggaggcttcgtctgtctgcgtccgcaaaagagaatgcaggattagcctttcccacggctacagcacttgactccactacccagattgtcatcactttccatgttacggccatcagacaaattgactggcggcacgacgaagag

SEQ ID NO: 640 - protein, 867 aa, Artificial Sequence
  Synthetic
MALVDYGKLFEDLNQISMGVLDRVEFSEVMVIHRMYVRLADLNVGQLEGAEKVKRLYVFADVVELPVVEWRWPPQIPGSVTVIILCRLLQWPTDGRQSDTELHLTFMKLHAIQREENRWEITAADGMNWGVYIHAEEVQVGVLTMSWSSVLRVSALRSVITSGFRAVSVFEVPGSVRSTLGATLRPDHALYSTTMQATPNASHISAFNLRIVSPSAYRVCPLQNDTDTYLGIPADVAAVLPVDVVTDPNILLGMQTTVHIAELVKACHPSPDVVSAVGEHLNWLNKLLLPLKESTQLQGSESYKECLALLGRVHAAMKMVRIGLVVPQLQYRMYKDLIDRMVQVAQSYDQDFKQLKLFVEQNKILGSYLLEQNKAFAEKEKDMDAFHSQVIDLRTSELESTIERMDDLSKQMEEQNAAMEQAKADMDAGLIAYQNKQVANAVFAVLGAIASIGLAFATGGATAPGAVASAGQAVSIAGQAAQGLRRVVEILEQLEAVMEVVAAVKDLVDSLEQVGQIVDAPVMPELPSEADWSIFVNEVEAVAEGMPTEVSEVPVWRAKCKNVAALGREMSITAVQMSELQYDIWVQGMMRDMARSQADRLAAIQPADLTNYLEMATQMDMRTTRMLLGLLNILRIQNAALRYEYLLMPTELTTWPLGMDTVGDLLIAQENAALIGLMQLGPSSDFTSRHVVKDIPVNLLLDGEDWEFEIPVQAGMSSFPSSWSRVRIRHLEMHFVKEASGIGGEIIHQPTTQTGTVYILLQGSTIFHDRRRDQVLPFQAAAPLNYHYAYRLDTGDSTLTNEPSEQFANKFMQMTPFTRWRLRLSASAKENAGLAFPTATALDSTTQIVITFHVTAIRQIDWRHDEE

SEQ ID NO: 641 - protein, 867 aa, Artificial Sequence
  Synthetic
MALVDYGKLFEDLNQISMGVLDRVEFSEVMVIHRMYVRLADLNVGQLEGAEKVKRLYVFADVVELPVVEWRWPPQIPGSVTVIILCRLLQWPTDGRQSDTELHLTFMKLHAIQREENRWEITAADGMNWGVYIHAEEVQVGVLTMSWSSVLRVSALRSVITSGFRAVSVFEVPGSVRSTLGATLRPDHALYSTTMQATPNASHISAFNLRIVSPSAYRVCPLQNDTDTYLGIPADVAAVLPVDVVTDPNILLGMQTTVHIAELVKACHPSPDVVSAVGEHLNWLNKLLLPLKESTQLQGSESYKECLALLGRVHAAMKMVRIGLVVPQLQYRMYGSLINQMAQVAQNYDREFKQFKLFIIQNQILGSYLLQQNRAFAERELQMESFHAAVISQRREELDNTFAKMDRLSGQMEAESSAMEQAKKEMDEGLRQFQNRQVANALFAVLSAVAQIGLAFLTAGATAPGAVASAGAAVTAAGKAAEGLKKVVEILEGLQAVMEVVAVIKELVQSLQEIGQLVDAPEMPDLPSDAEWEIFVNEVEAVAEQMPTEVTEVPAWKAKCKNVAALGREMSTMAAHIAELQFEIQVQEMLREIAKKQADRLSSIKPADLTNYLEMATQMDMRTTRMLLGLLNILRIQNAALRYEYLLMPTELTTWPLGMDTVGDLLIAQENAALIGLMQLGPSSDFTSRHVVKDIPVNLLLDGEDWEFEIPVQAGMSSFPSSWSRVRIRHLEMHFVKEASGIGGEIIHQPTTQTGTVYILLQGSTIFHDRRRDQVLPFQAAAPLNYHYAYRLDTGDSTLTNEPSEQFANKFMQMTPFTRWRLRLSASAKENAGLAFPTATALDSTTQIVITFHVTAIRQIDWRHDEE

SEQ ID NO: 642 - protein, 867 aa, Artificial Sequence
  Synthetic
MALVDYGKLFEDLNQISMGVLDRVEFSEVMVIHRMYVRLADLNVGQLEGAEKVKRLYVFADVVELPVVEWRWPPQIPGSVTVIILCRLLQWPTDGRQSDTELHLTFMKLHAIQREENRWEITAADGMNWGVYIHAEEVQVGVLTMSWSSVLRVSALRSVITSGFRAVSVFEVPGSVRSTLGATLRPDHALYSTTMQATPNASHISAFNLRIVSPSAYRVCPLQNDTDTYLGIPADVAAVLPVDVVTDPNILLGMQTTVHIAELVKACHPSPDVVSAVGEHLNWLNKLLLPLKESTQLQGSESYKECLALLGRVHAAMKMVRIGLVVPQLQYRMYGSLINQMAQVAQNYDREFKQFKLFIIQNQILGSYLLQQNRAFAERELQMESFHAAVISQRREELDNTFAKMDRLSGQMEAESSAMEQAKKEMDEGLRQFQNRQVANALFAVLSAVAQIGLAFLTAGATAPGAVASAGQAVSIAGQAAQGLRRVVEILEQLEAVMEVVAAVKDLVDSLEQVGQIVDAPVMPELPSEADWSIFVNEVEAVAEGMPTEVSEVPVWRAKCKNVAALGREMSITAVQMSELQYDIWVQGMMRDMARSQADRLAAIQPADLTNYLEMVSEMDMRTTRMLLELIRVLYIQNAALQYEYLQTPAPLNAWPVTMQTVWGLLVQQETAAINGLLQMGAPSDYTQEYAVRDVPVRLLLGGGDWEFEIPVQAGMSSFPSSWSRVRIRHLEMHFVKEASGIGGEIIHQPTTQTGTVYILLQGSTIFHDRRRDQVLPFQAAAPLNYHYAYRLDTGDSTLTNEPSEQFANKFMQMTPFTRWRLRLSASAKENAGLAFPTATALDSTTQIVITFHVTAIRQIDWRHDEE

SEQ ID NO: 643 - protein, 868 aa, Artificial Sequence
  Synthetic
MALVDYGKLFEDLNQISMGVLDRVEFSEVMVIHRMYVRLADLNVGQLEGAEKVKRLYVFADVVELPVVEWRWPPQIPGSVTVIILCRLLQWPTDGRQSDTELHLTFMKLHAIQREENRWEITAADGMNWGVYIHAEEVQVGVLTMSWSSVLRVSALRSVITSGFRAVSVFEVPGSVRSTLGATLRPDHALYSTTMQATPNASHISAFNLRIVSPSAYRVCPLQNDTDTYLGIPADVAAVLPVDVVTDPNILLGMQTTVHIAELVKACHPSPDVVSAVGEHLNWLNKLLLPLKESTQLQGSESYKECLALLGRVHAAMKMVRIGLVVPQLQYRMYGSLINQMAQVAQNYDREFKQFKLFIIQNQILGSYLLQQNRAFAERELQMESFHAAVISQRREELDNTFAKMDRLSGQMEAESSAMEQAKKEMDEGLRQFQNRQVANALFAVLSAVAQIGLAFLTAGATAPGAVASAGQAVSIAGQAAQGLRRVVEILEQLEAVMEVVAAVKDLVDSLEQVGQIVDAPVMPELPSEADWSIFVNEVEAVAEGMPTEVSEVPVWRAKCKNVAALGREMSITAVQMSELQYDIWVQGMMRDMARSQADRLAAIQPADLTNYLEMATQMDMRTTRMLLGLLNILRIQNAALRYEYLLMPTELTTWPLGMDTVGDLLIAQENAALIGLMQLGPSSDFTSRHVVKDIPVNLLLDGEDWEFEIPVQAGMSSFPSSWSRVRIRHLEMHFVKEASGIGGEIIHQPVTSTGEVYMLLQSSRFFEDRAKRENEFISYEGGMGLQYQYAYRLATGDATVTNVPSEEYANTFMRLAPFTRWRLRLSASAPENKGLAFPTATLADATTRIKITFHVSAIRRISTRVAV

SEQ ID NO: 644 - protein, 866 aa, Artificial Sequence
  Synthetic
MALVDYGKLFEDLNQISMGVLDRVEFSEVMVIHRMYVRLADLNVGQLEGAEKVKRLYVFADVVELPVVEWRWPPQIPGSVTVIILCRLLQWPTDGRQSDTELHLTFMKLHAIQREENRWEITAADGMNWGVYIHAEEVQVGVLTMSWSSVLRVSALRSVITSGFRAVSVFEVPGSVRSTLGATLRPDHALYSTTMQATPNASHISAFNLRIVSPSAYRVCPLQNDTDTYLGIPADVAAVLPVDVVTDPNILLGMQTTVHIAELVKACHPSPDVVSAVGEHLNWLNKLLLPLKESTQLQGSESYKECLALLGRVHAAMKMVRIGLVVPQLQYRMYGSLINQMAQVAQNYDREFKQFKLFIIQNQILGSYLLQQNRAFAERELQMESFHAAVISQRREELDNTFAKMDRLSGQMEAESSAMEQAKKEMDEGLRQFQNRQVANALFAVLSAVAQIGLAFLTAGATAPGAVASAGQAVSIAGQAAQGLRRVVEILEQLEAVMEVVAAVKDLVDSLEQVGQIVDAPVMPELPSEADWSIFVNEVEAVAEGMPTEVSEVPVWRAKCKNVAALGREMSITAVQMSELQYDIWVQGMMRDMARSQADRLAAIQPADLTNYLEMATQMDMRTTRMLLGLLNILRIQNAALRYEYLLMPTELTTWPLGMDTVGDLLIAQENAALIGLMQLGPSSDFTSRHVVKDIPVNLLLDGEDWEFEIPVQAGMSSFPSSWSRVRIRHLEMHFVKEASGIGGEIIHQPTTQTGTVYILLQGSTIFHDRRRDQVLPFQAAAPLNYHYAYRLDTGDSTLTNEPSEQFANKFMQMTPFTRWRLRLSASAPENKGLAFPTATLADATTRIKITFHVSAIRRISTRVAV

SEQ ID NO: 645 - protein, 867 aa, Artificial Sequence
  Synthetic
MALVDYGKLFEDLNQISMGVLDRVEFSEVMVIHRMYVRLADLNVGQLEGAEKVKRLYVFADVVELPVVEWRWPPQIPGSVTVIILCRLLQWPTDGRQSDTELHLTFMKLHAIQREENRWEITAADGMNWGVYIHAEEVQVGVLTMSWSSVLRVSALRSVITSGFRAVSVFEVPGSVRSTLGATLRPDHALYSTTMQATPNASHISAFNLRIVSPSAYRVCPLQNDTDTYLGIPADVAAVLPVDVVTDPNILLGMQTTVHIAELVKACHPSPDVVSAVGEHLNWLNKLLLPLKESTQLQGSESYKECLALLGRVHAAMKMVRIGLVVPQLQYRMYKDLIDRMVQVAQSYDQDFKQLKLFVEQNKILGSYLLEQNKAFAEKEKDMDAFHSQVIDLRTSELESTIERMDDLSKQMEEQNAAMEQAKADMDAGLIAYQNKQVANAVFAVLGAIASIGLAFATGGATAPGAVASAGAAVTAAGKAAEGLKKVVEILEGLQAVMEVVAVIKELVQSLQEIGQLVDAPEMPDLPSDAEWEIFVNEVEAVAEQMPTEVTEVPAWKAKCKNVAALGREMSTMAAHIAELQFEIQVQEMLREIAKKQADRLSSIKPADLTNYLEMVSEMDMRTTRMLLELIRVLYIQNAALQYEYLQTPAPLNAWPVTMQTVWGLLVQQETAAINGLLQMGAPSDYTQEYAVRDVPVRLLLGGGDWEFEIPVQAGMSSFPSSWSRVRIRHLEMHFVKEASGIGGEIIHQPTTQTGTVYILLQGSTIFHDRRRDQVLPFQAAAPLNYHYAYRLDTGDSTLTNEPSEQFANKFMQMTPFTRWRLRLSASAKENAGLAFPTATALDSTTQIVITFHVTAIRQIDWRHDEE

SEQ ID NO: 646 - protein, 50 aa, artificial sequence
  Synthetic
  misc_feature (3)..(3): Xaa can be any naturally occurring amino acid
  misc_feature (17)..(17): Xaa can be any naturally occurring amino acid
  misc_feature (33)..(33): Xaa can be any naturally occurring amino acid
  misc_feature (41)..(41): Xaa can be any naturally occurring amino acid
  misc_feature (49)..(49): Xaa can be any naturally occurring amino acid
MPXMPSEADWSIFVNEXEAVAEGMPTEVSEVPXWKAKCKNXAALGREMXI

SEQ ID NO: 647 - protein, 50 aa, artificial sequence
  Synthetic
  misc_feature (10)..(10): Xaa can be any naturally occurring amino acid
  misc_feature (13)..(13): Xaa can be any naturally occurring amino acid
  misc_feature (25)..(25): Xaa can be any naturally occurring amino acid
  misc_feature (29)..(29): Xaa can be any naturally occurring amino acid
  misc_feature (34)..(34): Xaa can be any naturally occurring amino acid
  misc_feature (39)..(39): Xaa can be any naturally occurring amino acid
  misc_feature (48)..(48): Xaa can be any naturally occurring amino acid
PQLQYRMYGXLIXQMAQVAQNYDQXFKQXKLFIXQNQIXGSYLLQQNXAF

SEQ ID NO: 648 - protein, 50 aa, artificial sequence
  Synthetic
  misc_feature (25)..(25): Xaa can be any naturally occurring amino acid
  misc_feature (34)..(34): Xaa can be any naturally occurring amino acid
  misc_feature (39)..(40): Xaa can be any naturally occurring amino acid
NTFMQMTPFTRWRLRLSASASENAXLAFPTATAXDSTTXXVITFHVTAIR

SEQ ID NO: 649 - protein, 36 aa, artificial sequence
  Synthetic
  misc_feature (1)..(1): Xaa can be any naturally occurring amino acid
  misc_feature (10)..(10): Xaa can be any naturally occurring amino acid
  misc_feature (30)..(30): Xaa can be any naturally occurring amino acid
XFTSRHVVKXIPVSLLLDGEDWEFEIPVQXGMSSFP

SEQ ID NO: 650 - protein, 50 aa, artificial sequence
  Synthetic
  misc_feature (6)..(6): Xaa can be any naturally occurring amino acid
  misc_feature (8)..(9): Xaa can be any naturally occurring amino acid
  misc_feature (11)..(11): Xaa can be any naturally occurring amino acid
  misc_feature (28)..(28): Xaa can be any naturally occurring amino acid
  misc_feature (37)..(37): Xaa can be any naturally occurring amino acid
  misc_feature (41)..(42): Xaa can be any naturally occurring amino acid
IIHQPXTXXGXVYILLQGSTIFHDRRRXEVMTFQAAXPLNXXYAYRLDTG

SEQ ID NO: 651 - protein, 50 aa, artificial sequence
  Synthetic
  misc_feature (2)..(2): Xaa can be any naturally occurring amino acid
  misc_feature (12)..(12): Xaa can be any naturally occurring amino acid
  misc_feature (17)..(17): Xaa can be any naturally occurring amino acid
  misc_feature (23)..(23): Xaa can be any naturally occurring amino acid
  misc_feature (30)..(31): Xaa can be any naturally occurring amino acid
  misc_feature (33)..(33): Xaa can be any naturally occurring amino acid
  misc_feature (38)..(38): Xaa can be any naturally occurring amino acid
SXADRLAAIQPXDLTNXLEMATXMDMRTTXXLXGLLNXLRIQNAALMYEY

SEQ ID NO: 652 - protein, 44 aa, artificial sequence
  Synthetic
  misc_feature (1)..(1): Xaa can be any naturally occurring amino acid
  misc_feature (20)..(20): Xaa can be any naturally occurring amino acid
  misc_feature (23)..(23): Xaa can be any naturally occurring amino acid
  misc_feature (28)..(28): Xaa can be any naturally occurring amino acid
  misc_feature (31)..(32): Xaa can be any naturally occurring amino acid
  misc_feature (36)..(36): Xaa can be any naturally occurring amino acid
  misc_feature (39)..(39): Xaa can be any naturally occurring amino acid
XDRVEFSEVMVIHRMYVRLXDLXVGELXGAXXVKRXYVXADVVE

SEQ ID NO: 653 - protein, 50 aa, artificial sequence
  Synthetic
  misc_feature (2)..(2): Xaa can be any naturally occurring amino acid
  misc_feature (23)..(23): Xaa can be any naturally occurring amino acid
  misc_feature (26)..(26): Xaa can be any naturally occurring amino acid
  misc_feature (30)..(30): Xaa can be any naturally occurring amino acid
  misc_feature (32)..(32): Xaa can be any naturally occurring amino acid
  misc_feature (40)..(40): Xaa can be any naturally occurring amino acid
AXRELQMESFHSAVISQRRQELXTAXAKMXRXSLQMEEEXRAMEQAQKEM

SEQ ID NO: 654 - protein, 50 aa, artificial sequence
  Synthetic
  misc_feature (12)..(12): Xaa can be any naturally occurring amino acid
  misc_feature (28)..(28): Xaa can be any naturally occurring amino acid
  misc_feature (38)..(38): Xaa can be any naturally occurring amino acid
  misc_feature (49)..(49): Xaa can be any naturally occurring amino acid
FVTAGATAPGAXASAGQAVSIAGQAAQXLRRVVEILEXLEAVMEVVAAXK

SEQ ID NO: 655 - protein, 50 aa, artificial sequence
  Synthetic
  misc_feature (7)..(7): Xaa can be any naturally occurring amino acid
  misc_feature (10)..(10): Xaa can be any naturally occurring amino acid
  misc_feature (13)..(13): Xaa can be any naturally occurring amino acid
  misc_feature (15)..(15): Xaa can be any naturally occurring amino acid
  misc_feature (34)..(34): Xaa can be any naturally occurring amino acid
  misc_feature (43)..(43): Xaa can be any naturally occurring amino acid
  misc_feature (49)..(49): Xaa can be any naturally occurring amino acid
DGMNWGXYIXGEXVXRSPLLPSNAILAVWADRCXITSARHNHXNAPGRXI

SEQ ID NO: 656 - protein, 50 aa, artificial sequence
  Synthetic
  misc_feature (1)..(3): Xaa can be any naturally occurring amino acid
  misc_feature (11)..(11): Xaa can be any naturally occurring amino acid
  misc_feature (31)..(31): Xaa can be any naturally occurring amino acid
  misc_feature (35)..(35): Xaa can be any naturally occurring amino acid
  misc_feature (39)..(39): Xaa can be any naturally occurring amino acid
XXXRPPSPDMXSAVAEHALWLNDVLLQVVQXESQXQGTXPYNECLALLGR

SEQ ID NO: 657 - protein, 36 aa, artificial sequence
  Synthetic
  misc_feature (6)..(6): Xaa can be any naturally occurring amino acid
  misc_feature (15)..(15): Xaa can be any naturally occurring amino acid
  misc_feature (27)..(27): Xaa can be any naturally occurring amino acid
PTELTXWPLGMDTVXNLLIAQENAALXGLIQLGPSS

SEQ ID NO: 658 - protein, 30 aa, artificial sequence
  Synthetic
  misc_feature (4)..(5): Xaa can be any naturally occurring amino acid
  misc_feature (14)..(14): Xaa can be any naturally occurring amino acid
  misc_feature (23)..(23): Xaa can be any naturally occurring amino acid
  misc_feature (29)..(29): Xaa can be any naturally occurring amino acid
RDQXXMPGSVTVIXLCRLLQFPXDGSQAXT

SEQ ID NO: 659 - protein, 26 aa, artificial sequence
  Synthetic
  misc_feature (12)..(12): Xaa can be any naturally occurring amino acid
  misc_feature (22)..(22): Xaa can be any naturally occurring amino acid
TSIPVEVVTDPXILLGMQTTVXIAEL

SEQ ID NO: 660 - protein, 26 aa, artificial sequence
  Synthetic
  misc_feature (5)..(5): Xaa can be any naturally occurring amino acid
  misc_feature (15)..(15): Xaa can be any naturally occurring amino acid
  misc_feature (24)..(24): Xaa can be any naturally occurring amino acid
  misc_feature (26)..(26): Xaa can be any naturally occurring amino acid
EGLRXFQNRQVARAXFAVLKAVAXIX

SEQ ID NO: 661 - protein, 19 aa, artificial sequence
  Synthetic
  misc_feature (2)..(2): Xaa can be any naturally occurring amino acid
  misc_feature (12)..(12): Xaa can be any naturally occurring amino acid
  misc_feature (14)..(14): Xaa can be any naturally occurring amino acid
WXRVRIRHLEMXFXQEASG

SEQ ID NO: 662 - protein, 19 aa, artificial sequence
  Synthetic
  misc_feature (8)..(8): Xaa can be any naturally occurring amino acid
  misc_feature (14)..(15): Xaa can be any naturally occurring amino acid
QISELQYXIWVQGXXRDIA

SEQ ID NO: 663 - protein, 36 aa, artificial sequence
  Synthetic
TFTLGSGVTGITSMHGEPSLDPWNGVSLDSASPTAF

SEQ ID NO: 664 - protein, 14 aa, artificial sequence
  Synthetic
MDYSTLYRDLNQIS

SEQ ID NO: 665 - protein, 19 aa, artificial sequence
  Synthetic
  misc_feature (7)..(7): Xaa can be any naturally occurring amino acid
  misc_feature (17)..(17): Xaa can be any naturally occurring amino acid
  misc_feature (19)..(19): Xaa can be any naturally occurring amino acid
LRLPFMXLHARVIEQNXKX

SEQ ID NO: 666 - protein, 14 aa, artificial sequence
  Synthetic
  misc_feature (9)..(10): Xaa can be any naturally occurring amino acid
  misc_feature (12)..(12): Xaa can be any naturally occurring amino acid
VDSLEQVGXXVXAP

SEQ ID NO: 667 - protein, 14 aa, artificial sequence
  Synthetic
  misc_feature (1)..(3): Xaa can be any naturally occurring amino acid
  misc_feature (7)..(7): Xaa can be any naturally occurring amino acid
  misc_feature (11)..(12): Xaa can be any naturally occurring amino acid
XXXVMKXGRFXXVV

SEQ ID NO: 668 - protein, 10 aa, artificial sequence
  Synthetic
  misc_feature (9)..(9): Xaa can be any naturally occurring amino acid
TLTNEPSEXF

SEQ ID NO: 669 - protein, 10 aa, artificial sequence
  Synthetic
LPRQSRNISF

SEQ ID NO: 670 - protein, 50 aa, artificial sequence
  Synthetic
  misc_feature (3)..(3): Xaa can be any naturally occurring amino acid
  misc_feature (6)..(7): Xaa can be any naturally occurring amino acid
  misc_feature (17)..(17): Xaa can be any naturally occurring amino acid
  misc_feature (33)..(33): Xaa can be any naturally occurring amino acid
  misc_feature (35)..(35): Xaa can be any naturally occurring amino acid
  misc_feature (41)..(41): Xaa can be any naturally occurring amino acid
  misc_feature (49)..(49): Xaa can be any naturally occurring amino acid
MPXMPXXADWSIFVNEXEAVAEGMPTEVSEVPXWXAKCKNXAALGREMXI

SEQ ID NO: 671 - protein, 50 aa, artificial sequence
  Synthetic
  misc_feature (10)..(10): Xaa can be any naturally occurring amino acid
  misc_feature (13)..(13): Xaa can be any naturally occurring amino acid
  misc_feature (24)..(25): Xaa can be any naturally occurring amino acid
  misc_feature (28)..(30): Xaa can be any naturally occurring amino acid
  misc_feature (34)..(34): Xaa can be any naturally occurring amino acid
  misc_feature (39)..(39): Xaa can be any naturally occurring amino acid
  misc_feature (45)..(45): Xaa can be any naturally occurring amino acid
  misc_feature (48)..(48): Xaa can be any naturally occurring amino acid
PQLQYRMYGXLIXQMAQVAQNYDXXFKXXXLFIXQNQIXGSYLLXQNXAF

SEQ ID NO: 672 - protein, 50 aa, artificial sequence
  Synthetic
  misc_feature (2)..(2): Xaa can be any naturally occurring amino acid
  misc_feature (11)..(11): Xaa can be any naturally occurring amino acid
  misc_feature (21)..(21): Xaa can be any naturally occurring amino acid
  misc_feature (24)..(25): Xaa can be any naturally occurring amino acid
  misc_feature (34)..(34): Xaa can be any naturally occurring amino acid
  misc_feature (39)..(41): Xaa can be any naturally occurring amino acid
NXFMQMTPFTXWRLRLSASAXENXXLAFPTATAXDSTTXXXITFHVTAIR

SEQ ID NO: 673 - protein, 36 aa, artificial sequence
  Synthetic
  misc_feature (1)..(1): Xaa can be any naturally occurring amino acid
  misc_feature (10)..(10): Xaa can be any naturally occurring amino acid
  misc_feature (14)..(14): Xaa can be any naturally occurring amino acid
  misc_feature (20)..(20): Xaa can be any naturally occurring amino acid
  misc_feature (30)..(30): Xaa can be any naturally occurring amino acid
XFTSRHVVKXIPVXLLLDGXDWEFEIPVQXGMSSFP

SEQ ID NO: 674 - protein, 50 aa, artificial sequence
  Synthetic
  misc_feature (6)..(6): Xaa can be any naturally occurring amino acid
  misc_feature (8)..(9): Xaa can be any naturally occurring amino acid
  misc_feature (11)..(12): Xaa can be any naturally occurring amino acid
  misc_feature (21)..(21): Xaa can be any naturally occurring amino acid
  misc_feature (28)..(29): Xaa can be any naturally occurring amino acid
  misc_feature (31)..(31): Xaa can be any naturally occurring amino acid
  misc_feature (33)..(33): Xaa can be any naturally occurring amino acid
  misc_feature (37)..(37): Xaa can be any naturally occurring amino acid
  misc_feature (41)..(42): Xaa can be any naturally occurring amino acid
IIHQPXTXXGXXYILLQGSTXFHDRRRXXVXTXQAAXPLNXXYAYRLDTG

SEQ ID NO: 675 - protein, 50 aa, artificial sequence
  Synthetic
  misc_feature (2)..(2): Xaa can be any naturally occurring amino acid
  misc_feature (12)..(13): Xaa can be any naturally occurring amino acid
  misc_feature (17)..(17): Xaa can be any naturally occurring amino acid
  misc_feature (23)..(23): Xaa can be any naturally occurring amino acid
  misc_feature (30)..(31): Xaa can be any naturally occurring amino acid
  misc_feature (33)..(33): Xaa can be any naturally occurring amino acid
  misc_feature (38)..(39): Xaa can be any naturally occurring amino acid
  misc_feature (47)..(47): Xaa can be any naturally occurring amino acid
SXADRLAAIQPXXLTNXLEMATXMDMRTTXXLXGLLNXXRIQNAALXYEY

SEQ ID NO: 676 - protein, 45 aa, artificial sequence
  Synthetic
  misc_feature (1)..(1): Xaa can be any naturally occurring amino acid
  misc_feature (3)..(3): Xaa can be any naturally occurring amino acid
  misc_feature (21)..(21): Xaa can be any naturally occurring amino acid
  misc_feature (24)..(24): Xaa can be any naturally occurring amino acid
  misc_feature (26)..(27): Xaa can be any naturally occurring amino acid
  misc_feature (29)..(29): Xaa can be any naturally occurring amino acid
  misc_feature (32)..(33): Xaa can be any naturally occurring amino acid
  misc_feature (37)..(37): Xaa can be any naturally occurring amino acid
  misc_feature (40)..(40): Xaa can be any naturally occurring amino acid
XDXVEFSEVMVIHRMYVNRLXDLXVXXLXGAXXVKRXYVXADVVE

SEQ ID NO: 677 - protein, 50 aa, artificial sequence
  Synthetic
  misc_feature (2)..(2): Xaa can be any naturally occurring amino acid
  misc_feature (12)..(12): Xaa can be any naturally occurring amino acid
  misc_feature (18)..(18): Xaa can be any naturally occurring amino acid
  misc_feature (20)..(20): Xaa can be any naturally occurring amino acid
  misc_feature (23)..(26): Xaa can be any naturally occurring amino acid
  misc_feature (30)..(30): Xaa can be any naturally occurring amino acid
  misc_feature (32)..(32): Xaa can be any naturally occurring amino acid
  misc_feature (40)..(41): Xaa can be any naturally occurring amino acid
  misc_feature (47)..(47): Xaa can be any naturally occurring amino acid
AXRELQMESFHXAVISQXRXELXXXXAKMXRXSLQMEEEXXAMEQAXKEM

SEQ ID NO: 678 - protein, 50 aa, artificial sequence
  Synthetic
  misc_feature (2)..(2): Xaa can be any naturally occurring amino acid
  misc_feature (12)..(12): Xaa can be any naturally occurring amino acid
  misc_feature (20)..(20): Xaa can be any naturally occurring amino acid
  misc_feature (28)..(28): Xaa can be any naturally occurring amino acid
  misc_feature (38)..(38): Xaa can be any naturally occurring amino acid
  misc_feature (49)..(49): Xaa can be any naturally occurring amino acid
FXTAGATAPGAXASAGQAVXIAGQAAQXLRRVVEILEXLEAVMEVVAAXK

SEQ ID NO: 679 - protein, 50 aa, artificial sequence
  Synthetic
  misc_feature (2)..(4): Xaa can be any naturally occurring amino acid
  misc_feature (7)..(7): Xaa can be any naturally occurring amino acid
  misc_feature (9)..(11): Xaa can be any naturally occurring amino acid
  misc_feature (13)..(13): Xaa can be any naturally occurring amino acid
  misc_feature (15)..(16): Xaa can be any naturally occurring amino acid
  misc_feature (20)..(25): Xaa can be any naturally occurring amino acid
  misc_feature (27)..(27): Xaa can be any naturally occurring amino acid
  misc_feature (29)..(29): Xaa can be any naturally occurring amino acid
  misc_feature (31)..(31): Xaa can be any naturally occurring amino acid
  misc_feature (33)..(34): Xaa can be any naturally occurring amino acid
  misc_feature (37)..(37): Xaa can be any naturally occurring amino acid
  misc_feature (39)..(39): Xaa can be any naturally occurring amino acid
  misc_feature (42)..(45): Xaa can be any naturally occurring amino acid
  misc_feature (48)..(50): Xaa can be any naturally occurring amino acid
DXXXWGXYXXXEXVXXSPLXXXXXXLXVXAXRXXITXAXHNXXXXPGXXX

SEQ ID NO: 680 - protein, 50 aa, artificial sequence
  Synthetic
  misc_feature (1)..(5): Xaa can be any naturally occurring amino acid
  misc_feature (9)..(11): Xaa can be any naturally occurring amino acid
  misc_feature (15)..(16): Xaa can be any naturally occurring amino acid
  misc_feature (19)..(19): Xaa can be any naturally occurring amino acid
  misc_feature (22)..(23): Xaa can be any naturally occurring amino acid
  misc_feature (27)..(27): Xaa can be any naturally occurring amino acid
  misc_feature (31)..(31): Xaa can be any naturally occurring amino acid
  misc_feature (34)..(35): Xaa can be any naturally occurring amino acid
  misc_feature (39)..(40): Xaa can be any naturally occurring amino acid
XXXXXPSPXXXSAVXXHAXWLXXVLLXVVQXESXXQGTXXYNECLALLGR

SEQ ID NO: 681 - protein, 36 aa, artificial sequence
  Synthetic
  misc_feature (1)..(1): Xaa can be any naturally occurring amino acid
  misc_feature (3)..(3): Xaa can be any naturally occurring amino acid
  misc_feature (6)..(6): Xaa can be any naturally occurring amino acid
  misc_feature (10)..(10): Xaa can be any naturally occurring amino acid
  misc_feature (15)..(16): Xaa can be any naturally occurring amino acid
  misc_feature (20)..(21): Xaa can be any naturally occurring amino acid
  misc_feature (23)..(23): Xaa can be any naturally occurring amino acid
  misc_feature (27)..(27): Xaa can be any naturally occurring amino acid
  misc_feature (30)..(30): Xaa can be any naturally occurring amino acid
  misc_feature (34)..(35): Xaa can be any naturally occurring amino acid
XTXLTXWPLXMDTVXXLLIXXEXAALXGLXQLGXXS

SEQ ID NO: 682 - protein, 30 aa, artificial sequence
  Synthetic
  misc_feature (1)..(6): Xaa can be any naturally occurring amino acid
  misc_feature (14)..(14): Xaa can be any naturally occurring amino acid
  misc_feature (23)..(24): Xaa can be any naturally occurring amino acid
  misc_feature (26)..(30): Xaa can be any naturally occurring amino acid
XXXXXXPGSVTVIXLCRLLQFPXXGXXXXX

SEQ ID NO: 683 - protein, 26 aa, artificial sequence
  Synthetic
  misc_feature (1)..(3): Xaa can be any naturally occurring amino acid
  misc_feature (6)..(6): Xaa can be any naturally occurring amino acid
  misc_feature (12)..(12): Xaa can be any naturally occurring amino acid
  misc_feature (15)..(15): Xaa can be any naturally occurring amino acid
  misc_feature (20)..(20): Xaa can be any naturally occurring amino acid
  misc_feature (22)..(22): Xaa can be any naturally occurring amino acid
XXXPVXVVTDPXILXGMQTXVXIAEL

SEQ ID NO: 684 - protein, 26 aa, artificial sequence
  Synthetic
  misc_feature (5)..(5): Xaa can be any naturally occurring amino acid
  misc_feature (9)..(9): Xaa can be any naturally occurring amino acid
  misc_feature (13)..(13): Xaa can be any naturally occurring amino acid
  misc_feature (15)..(15): Xaa can be any naturally occurring amino acid
  misc_feature (20)..(21): Xaa can be any naturally occurring amino acid
  misc_feature (24)..(24): Xaa can be any naturally occurring amino acid
  misc_feature (26)..(26): Xaa can be any naturally occurring amino acid
EGLRXFQNXQVAXAXFAVLXXVAXIX

SEQ ID NO: 685 - protein, 19 aa, artificial sequence
  Synthetic
  misc_feature (2)..(2): Xaa can be any naturally occurring amino acid
  misc_feature (12)..(12): Xaa can be any naturally occurring amino acid
  misc_feature (14)..(15): Xaa can be any naturally occurring amino acid
  misc_feature (17)..(19): Xaa can be any naturally occurring amino acid
WXRVRIRHLEMXFXXEXXX

SEQ ID NO: 686 - protein, 19 aa, artificial sequence
  Synthetic
  misc_feature (2)..(2): Xaa can be any naturally occurring amino acid
  misc_feature (4)..(4): Xaa can be any naturally occurring amino acid
  misc_feature (8)..(8): Xaa can be any naturally occurring amino acid
  misc_feature (14)..(15): Xaa can be any naturally occurring amino acid
  misc_feature (18)..(18): Xaa can be any naturally occurring amino acid
QXSXLQYXIWVQGXXRDXA

SEQ ID NO: 687 - protein, 14 aa, artificial sequence
  Synthetic
  misc_feature (1)..(1): Xaa can be any naturally occurring amino acid
  misc_feature (4)..(5): Xaa can be any naturally occurring amino acid
  misc_feature (7)..(8): Xaa can be any naturally occurring amino acid
XDYXXLXXDLNQIS

SEQ ID NO: 688 - protein, 19 aa, artificial sequence
  Synthetic
  misc_feature (2)..(2): Xaa can be any naturally occurring amino acid
  misc_feature (4)..(4): Xaa can be any naturally occurring amino acid
  misc_feature (7)..(7): Xaa can be any naturally occurring amino acid
  misc_feature (11)..(13): Xaa can be any naturally occurring amino acid
  misc_feature (15)..(19): Xaa can be any naturally occurring amino acid
LXLXFMXLHAXXXEXXXXX

SEQ ID NO: 689 - protein, 14 aa, artificial sequence
  Synthetic
  misc_feature (2)..(3): Xaa can be any naturally occurring amino acid
  misc_feature (5)..(5): Xaa can be any naturally occurring amino acid
  misc_feature (8)..(10): Xaa can be any naturally occurring amino acid
  misc_feature (12)..(12): Xaa can be any naturally occurring amino acid
VXXLXQVXXXVXAP

SEQ ID NO: 690 - protein, 14 aa, artificial sequence
  Synthetic
  misc_feature (1)..(5): Xaa can be any naturally occurring amino acid
  misc_feature (7)..(12): Xaa can be any naturally occurring amino acid
XXXXXKXXXXXXVV

SEQ ID NO: 691 - protein, 10 aa, artificial sequence
  Synthetic
  misc_feature (5)..(5): Xaa can be any naturally occurring amino acid
  misc_feature (9)..(9): Xaa can be any naturally occurring amino acid
TLTNXPSEXF

SEQ ID NO: 692 - protein, 10 aa, artificial sequence
  Synthetic
  misc_feature (3)..(3): Xaa can be any naturally occurring amino acid
  misc_feature (6)..(6): Xaa can be any naturally occurring amino acid
  misc_feature (8)..(8): Xaa can be any naturally occurring amino acid
LPXQSXNXSF

SEQ ID NO: 693 - protein, 50 aa, artificial sequence; identical to SEQ ID NO: 670
  Synthetic
  misc_feature (3)..(3): Xaa can be any naturally occurring amino acid
  misc_feature (6)..(7): Xaa can be any naturally occurring amino acid
  misc_feature (17)..(17): Xaa can be any naturally occurring amino acid
  misc_feature (33)..(33): Xaa can be any naturally occurring amino acid
  misc_feature (35)..(35): Xaa can be any naturally occurring amino acid
  misc_feature (41)..(41): Xaa can be any naturally occurring amino acid
  misc_feature (49)..(49): Xaa can be any naturally occurring amino acid

SEQ ID NO: 694 - protein, 50 aa, artificial sequence; identical to SEQ ID NO: 671
  Synthetic
  misc_feature (10)..(10): Xaa can be any naturally occurring amino acid
  misc_feature (13)..(13): Xaa can be any naturally occurring amino acid
  misc_feature (24)..(25): Xaa can be any naturally occurring amino acid
  misc_feature (28)..(30): Xaa can be any naturally occurring amino acid
  misc_feature (34)..(34): Xaa can be any naturally occurring amino acid
  misc_feature (39)..(39): Xaa can be any naturally occurring amino acid
  misc_feature (45)..(45): Xaa can be any naturally occurring amino acid
  misc_feature (48)..(48): Xaa can be any naturally occurring amino acid

SEQ ID NO: 695 - protein, 50 aa, artificial sequence; identical to SEQ ID NO: 672
  Synthetic
  misc_feature (2)..(2): Xaa can be any naturally occurring amino acid
  misc_feature (11)..(11): Xaa can be any naturally occurring amino acid
  misc_feature (21)..(21): Xaa can be any naturally occurring amino acid
  misc_feature (24)..(25): Xaa can be any naturally occurring amino acid
  misc_feature (34)..(34): Xaa can be any naturally occurring amino acid
  misc_feature (39)..(41): Xaa can be any naturally occurring amino acid

SEQ ID NO: 696 - protein, 36 aa, artificial sequence; identical to SEQ ID NO: 673
  Synthetic
  misc_feature (1)..(1): Xaa can be any naturally occurring amino acid
  misc_feature (10)..(10): Xaa can be any naturally occurring amino acid
  misc_feature (14)..(14): Xaa can be any naturally occurring amino acid
  misc_feature (20)..(20): Xaa can be any naturally occurring amino acid
  misc_feature (30)..(30): Xaa can be any naturally occurring amino acid

SEQ ID NO: 697 - protein, 50 aa, artificial sequence; identical to SEQ ID NO: 674
  Synthetic
  misc_feature (6)..(6): Xaa can be any naturally occurring amino acid
  misc_feature (8)..(9): Xaa can be any naturally occurring amino acid
  misc_feature (11)..(12): Xaa can be any naturally occurring amino acid
  misc_feature (21)..(21): Xaa can be any naturally occurring amino acid
  misc_feature (28)..(29): Xaa can be any naturally occurring amino acid
  misc_feature (31)..(31): Xaa can be any naturally occurring amino acid
  misc_feature (33)..(33): Xaa can be any naturally occurring amino acid
  misc_feature (37)..(37): Xaa can be any naturally occurring amino acid
  misc_feature (41)..(42): Xaa can be any naturally occurring amino acid

SEQ ID NO: 698 - protein, 50 aa, artificial sequence; identical to SEQ ID NO: 675
  Synthetic
  misc_feature (2)..(2): Xaa can be any naturally occurring amino acid
  misc_feature (12)..(13): Xaa can be any naturally occurring amino acid
  misc_feature (17)..(17): Xaa can be any naturally occurring amino acid
  misc_feature (23)..(23): Xaa can be any naturally occurring amino acid
  misc_feature (30)..(31): Xaa can be any naturally occurring amino acid
  misc_feature (33)..(33): Xaa can be any naturally occurring amino acid
  misc_feature (38)..(39): Xaa can be any naturally occurring amino acid
  misc_feature (47)..(47): Xaa can be any naturally occurring amino acid

SEQ ID NO: 699 - protein, 45 aa, artificial sequence; identical to SEQ ID NO: 676
  Synthetic
  misc_feature (1)..(1): Xaa can be any naturally occurring amino acid
  misc_feature (3)..(3): Xaa can be any naturally occurring amino acid
  misc_feature (21)..(21): Xaa can be any naturally occurring amino acid
  misc_feature (24)..(24): Xaa can be any naturally occurring amino acid
  misc_feature (26)..(27): Xaa can be any naturally occurring amino acid
  misc_feature (29)..(29): Xaa can be any naturally occurring amino acid
  misc_feature (32)..(33): Xaa can be any naturally occurring amino acid
  misc_feature (37)..(37): Xaa can be any naturally occurring amino acid
  misc_feature (40)..(40): Xaa can be any naturally occurring amino acid

SEQ ID NO: 700 - protein, 50 aa, artificial sequence; identical to SEQ ID NO: 677
  Synthetic
  misc_feature (2)..(2): Xaa can be any naturally occurring amino acid
  misc_feature (12)..(12): Xaa can be any naturally occurring amino acid
  misc_feature (18)..(18): Xaa can be any naturally occurring amino acid
  misc_feature (20)..(20): Xaa can be any naturally occurring amino acid
  misc_feature (23)..(26): Xaa can be any naturally occurring amino acid
  misc_feature (30)..(30): Xaa can be any naturally occurring amino acid
  misc_feature (32)..(32): Xaa can be any naturally occurring amino acid
  misc_feature (40)..(41): Xaa can be any naturally occurring amino acid
  misc_feature (47)..(47): Xaa can be any naturally occurring amino acid

SEQ ID NO: 701 - protein, 50 aa, artificial sequence; identical to SEQ ID NO: 678
  Synthetic
  misc_feature (2)..(2): Xaa can be any naturally occurring amino acid
  misc_feature (12)..(12): Xaa can be any naturally occurring amino acid
  misc_feature (20)..(20): Xaa can be any naturally occurring amino acid
  misc_feature (28)..(28): Xaa can be any naturally occurring amino acid
  misc_feature (38)..(38): Xaa can be any naturally occurring amino acid
  misc_feature (49)..(49): Xaa can be any naturally occurring amino acid

SEQ ID NO: 702 - protein, 50 aa, artificial sequence; identical to SEQ ID NO: 679
  Synthetic
  misc_feature (2)..(4): Xaa can be any naturally occurring amino acid
  misc_feature (7)..(7): Xaa can be any naturally occurring amino acid
  misc_feature (9)..(11): Xaa can be any naturally occurring amino acid
  misc_feature (13)..(13): Xaa can be any naturally occurring amino acid
  misc_feature (15)..(16): Xaa can be any naturally occurring amino acid
  misc_feature (20)..(25): Xaa can be any naturally occurring amino acid
  misc_feature (27)..(27): Xaa can be any naturally occurring amino acid
  misc_feature (29)..(29): Xaa can be any naturally occurring amino acid
  misc_feature (31)..(31): Xaa can be any naturally occurring amino acid
  misc_feature (33)..(34): Xaa can be any naturally occurring amino acid
  misc_feature (37)..(37): Xaa can be any naturally occurring amino acid
  misc_feature (39)..(39): Xaa can be any naturally occurring amino acid
  misc_feature (42)..(45): Xaa can be any naturally occurring amino acid
  misc_feature (48)..(50): Xaa can be any naturally occurring amino acid

SEQ ID NO: 703 - protein, 50 aa, artificial sequence; identical to SEQ ID NO: 680
  Synthetic
  misc_feature (1)..(5): Xaa can be any naturally occurring amino acid
  misc_feature (9)..(11): Xaa can be any naturally occurring amino acid
  misc_feature (15)..(16): Xaa can be any naturally occurring amino acid
  misc_feature (19)..(19): Xaa can be any naturally occurring amino acid
  misc_feature (22)..(23): Xaa can be any naturally occurring amino acid
  misc_feature (27)..(27): Xaa can be any naturally occurring amino acid
  misc_feature (31)..(31): Xaa can be any naturally occurring amino acid
  misc_feature (34)..(35): Xaa can be any naturally occurring amino acid
  misc_feature (39)..(40): Xaa can be any naturally occurring amino acid

SEQ ID NO: 704 - protein, 36 aa, artificial sequence; identical to SEQ ID NO: 681
  Synthetic
  misc_feature (1)..(1): Xaa can be any naturally occurring amino acid
  misc_feature (3)..(3): Xaa can be any naturally occurring amino acid
  misc_feature (6)..(6): Xaa can be any naturally occurring amino acid
  misc_feature (10)..(10): Xaa can be any naturally occurring amino acid
  misc_feature (15)..(16): Xaa can be any naturally occurring amino acid
  misc_feature (20)..(21): Xaa can be any naturally occurring amino acid
  misc_feature (23)..(23): Xaa can be any naturally occurring amino acid
  misc_feature (27)..(27): Xaa can be any naturally occurring amino acid
  misc_feature (30)..(30): Xaa can be any naturally occurring amino acid
  misc_feature (34)..(35): Xaa can be any naturally occurring amino acid

SEQ ID NO: 705 - protein, 30 aa, artificial sequence; identical to SEQ ID NO: 682
  Synthetic
  misc_feature (1)..(6): Xaa can be any naturally occurring amino acid
  misc_feature (14)..(14): Xaa can be any naturally occurring amino acid
  misc_feature (23)..(24): Xaa can be any naturally occurring amino acid
  misc_feature (26)..(30): Xaa can be any naturally occurring amino acid

SEQ ID NO: 706 - protein, 26 aa, artificial sequence
  Synthetic
  misc_feature (1)..(3): Xaa can be any naturally occurring amino acid
  misc_feature (6)..(6): Xaa can be any naturally occurring amino acid
  misc_feature (12)..(12): Xaa can be any naturally occurring amino acid
  misc_feature (15)..(15): Xaa can be any naturally occurring amino acid
  misc_feature (20)..(20): Xaa can be any naturally occurring amino acid
  misc_feature (22)..(22): Xaa can be any naturally occurring amino acid
XXXPVXVVTDPXILXGMQTXVXIAEL

SEQ ID NO: 707 - protein, 26 aa, artificial sequence
  Synthetic
  misc_feature (5)..(5): Xaa can be any naturally occurring amino acid
  misc_feature (9)..(9): Xaa can be any naturally occurring amino acid
  misc_feature (13)..(13): Xaa can be any naturally occurring amino acid
  misc_feature (15)..(15): Xaa can be any naturally occurring amino acid
  misc_feature (20)..(21): Xaa can be any naturally occurring amino acid
  misc_feature (24)..(24): Xaa can be any naturally occurring amino acid
  misc_feature (26)..(26): Xaa can be any naturally occurring amino acid
EGLRXFQNXQVAXAXFAVLXXVAXIX

SEQ ID NO: 708 - protein, 19 aa, artificial sequence
  Synthetic
  misc_feature (2)..(2): Xaa can be any naturally occurring amino acid
  misc_feature (12)..(12): Xaa can be any naturally occurring amino acid
  misc_feature (14)..(15): Xaa can be any naturally occurring amino acid
  misc_feature (17)..(19): Xaa can be any naturally occurring amino acid
WXRVRIRHLEMXFXXEXXX

SEQ ID NO: 709 - protein, 19 aa, artificial sequence
  Synthetic
  misc_feature (2)..(2): Xaa can be any naturally occurring amino acid
  misc_feature (4)..(4): Xaa can be any naturally occurring amino acid
  misc_feature (8)..(8): Xaa can be any naturally occurring amino acid
  misc_feature (14)..(15): Xaa can be any naturally occurring amino acid
  misc_feature (18)..(18): Xaa can be any naturally occurring amino acid
QXSXLQYXIWVQGXXRDXA

SEQ ID NO: 710 - protein, 14 aa, artificial sequence
  Synthetic
  misc_feature (1)..(1): Xaa can be any naturally occurring amino acid
  misc_feature (4)..(5): Xaa can be any naturally occurring amino acid
  misc_feature (7)..(8): Xaa can be any naturally occurring amino acid
XDYXXLXXDLNQIS

SEQ ID NO: 711 - protein, 19 aa, artificial sequence
  Synthetic
  misc_feature (2)..(2): Xaa can be any naturally occurring amino acid
  misc_feature (4)..(4): Xaa can be any naturally occurring amino acid
  misc_feature (7)..(7): Xaa can be any naturally occurring amino acid
  misc_feature (11)..(13): Xaa can be any naturally occurring amino acid
  misc_feature (15)..(19): Xaa can be any naturally occurring amino acid
LXLXFMXLHAXXXEXXXXX

SEQ ID NO: 712 - protein, 14 aa, artificial sequence
  Synthetic
  misc_feature (2)..(3): Xaa can be any naturally occurring amino acid
  misc_feature (5)..(5): Xaa can be any naturally occurring amino acid
  misc_feature (8)..(10): Xaa can be any naturally occurring amino acid
  misc_feature (12)..(12): Xaa can be any naturally occurring amino acid
VXXLXQVXXXVXAP

SEQ ID NO: 713 - protein, 14 aa, artificial sequence
  Synthetic
  misc_feature (1)..(5): Xaa can be any naturally occurring amino acid
  misc_feature (7)..(12): Xaa can be any naturally occurring amino acid
XXXXXKXXXXXXVV

SEQ ID NO: 714 - protein, 10 aa, artificial sequence
  Synthetic
  misc_feature (5)..(5): Xaa can be any naturally occurring amino acid
  misc_feature (9)..(9): Xaa can be any naturally occurring amino acid
TLTNXPSEXF

SEQ ID NO: 715 - protein, 10 aa, artificial sequence
  Synthetic
  misc_feature (3)..(3): Xaa can be any naturally occurring amino acid
  misc_feature (6)..(6): Xaa can be any naturally occurring amino acid
  misc_feature (8)..(8): Xaa can be any naturally occurring amino acid
LPXQSXNXSF

SEQ ID NO: 716 - protein, 886 aa, Polypodium punctatum
MEYSSLYGDVNQVSLRFQNMEFSEVMVVHRMHVRLEELDMTGLEGIEKVKRLYVLADVVELPSTATQVFQYLRLPASISAIILCRVLYIPEVDQRPHMAQCSLDFPFMRLHVVGSAHENGGGVMQAFSSDATPSNIGIYFHADRFIYRQATSSASNFVLPLDVRVSFGSSTFSAPTLRPDWQNLNVSNIQYGPQHLSRGPPLTSSDSDLQRSDEIELLAQQDVWSPLLHVAFSPNAPPGNIPGTQGIFRPSSACSFFHVPPPDVPANVLTDPSIILGMQMNMLIAELVLAAHNSPQVMNVITKHVLWLNKILLQVASPNDDILALLFRIQAFMKMAKEPRFVVPRLQYHMYGSLINRMVQVAQNYDQEFKQLKLFIAQNKILGSYLLQQNRAFAEREREMSAFHSQVVSMRRSELQSAIQTMDNLSLQMESESEAMNEAQENMVEAIQEYERKLLARALFSVIGAIASVALAFATGGATAPGAVAAAGGAVAAAGRLAAGLQKVVDILQGLQAVMEVVVAIRDIVESLKNMGQLVEAPEMPEMPTDADWLIFVNEVEAVAEQVPTEVAEVPVWKAKCKNVAVLGQAMCTTAAYISELQYQITVEEMLQEIAQRQADRLVGISAADLSSYTEMASQIDMRTTRILLELIKMLYIQNAAIKYEYLYDANEKLNSWPVSMETVWTMLLQQENAALLGLLDLGPTNDFTVTYAVKDIPTKLLVDGFDWNFEIAVEDFAIFPSGLSRVRIRYVELKFDQQGADSSNIVIHQPSTNTGLVYMLLQGSRFVHDRKRQEVMDYEASTGPVYAYAYDLNTGATTLNNIPSQQQANTFMQMTPFNAWRLRLSASAAENQGLVFPTATSPDNTTQISITFYVTAIRRIDLRQEGDVE

SEQ ID NO: 717 - DNA, 2661 bp, Polypodium punctatum
atggagtatagcagcttgtatggtgatgtgaaccaagtgagcctgaggttccagaacatggagttctctgaggtcatggtggtgcatcggatgcatgtgcgcctggaggagcttgacatgacggggttggagggcatcgagaaggtgaaacgcctgtacgtgctggcggacgtggtggagctgccttccacagccacccaggtgtttcagtatctgcgccttcccgcctccatttcagctattatcctctgccgcgttctctatatccctgaagttgatcagaggccccacatggctcaatgctcgctcgacttcccgtttatgcgcctccatgtcgtcggatctgcacacgagaacggtgggggtgttatgcaagccttttcctccgacgccacccccagcaatattggcatctacttccatgctgaccgattcatctaccgccaggccacatcttcggccagcaactttgtcttgcccctggatgtaagggtcagctttggcagctctaccttctcggccccaaccctccgtcccgactggcaaaaccttaatgtctccaacatccagtacgggccgcagcatttgtccaggggcccacccctcacatcctcagactctgacttgcaaagatctgacgagatcgagctcctggcgcagcaagatgtttggagccctcttttacatgtcgcgttcagcccgaatgcaccacctggcaacatcccgggtacacaaggaattttccgaccctcctctgcatgcagctttttccatgtgccgccaccggatgtccctgcgaatgtgctcactgatccttccatcatcttgggcatgcaaatgaacatgctcattgctgagcttgtcttggctgctcacaattcgccgcaggtcatgaacgtcatcactaagcatgtgctatggctcaacaagatcttgcttcaggttgcttcacccaatgatgatattttagcactcttgtttcgtatccaagcattcatgaagatggcaaaggaaccgcggtttgtggttccacggttgcagtaccacatgtacggtagccttatcaatcgaatggtgcaagtagcccagaattatgaccaggagttcaagcaactgaagcttttcatcgcacaaaataagattttgggaagctatttgctacaacaaaatagggcttttgcagaaagggagagggaaatgagtgcttttcactcgcaagtcgtatcgatgaggagatctgagctgcagtctgccatacaaacaatggacaatttgagtttgcaaatggaatcagagagtgaggcgatgaacgaagcccaggagaacatggttgaagcaattcaagagtatgaaaggaaattacttgcaagagctctattttctgtgattggggcaatagcaagcgtcgctcttgcatttgccactggtggtgcaactgcaccaggggcagtggcagcagctggaggggctgttgctgcagcagggaggttggcagcagggctccaaaaggttgtggacatcctacaaggcttgcaagcagtcatggaggttgtggtagccataagagacatcgtagaatcattgaaaaacatgggtcaactagtagaagctcccgagatgccagagatgccaacggatgcggactggttaatttttgtaaatgaggtggaggcagtggcagagcaagtgccaacagaagtggcagaggtcccagtgtggaaggcgaagtgcaagaatgtggctgtgctagggcaagcaatgtgcaccacagcagcatatattagtgagctacagtatcagatcacggtggaagagatgctacaagagattgcacaacgccaagcagacaggttggtggggatatcagcagcagatctatcgagctacacagagatggcatcgcaaatagacatgcgtacaacccgaatcctccttgagctcatcaagatgttgtacattcaaaatgcagcaattaagtatgagtacttgtatgatgctaatgagaagcttaattcatggccagtgagcatggagactgtatggaccatgctcttgcaacaagagaatgcagctctcttgggcttgctagacttggggcccaccaatgatttcactgtaacctatgctgtgaaagatatacctaccaagttgttagtagatgggtttgattggaattttgagatcgcggtggaggattttgcaatctttccatcaggattgtctcgtgttcgcatacgatatgttgagcttaaatttgaccaacaaggtgctgatagtagtaacattgtcatccaccagcctagcactaacactggcttagtctacatgctcttacaaggctcccggttcgtccatgaccgcaaacgtcaggaggtgatggactatgaggcaagcacgggacctgtatatgcatatgcctatgacctcaacactggtgcaaccactctcaacaacatcccctcacagcaacaggccaacacatttatgcaaatgacacccttcaatgcttggagacttcgcctctctgcctctgctgccgaaaatcagggattggtgtttcctacagcaacttctccggacaatactacccaaatttccatcacattctatgtcactgctattcgacgcatagatcttcgacaagagggtgatgtggagtaa

SEQ ID NO: 718 - DNA, 2598 bp, Artificial Sequence
  Synthetic
atggctctcgtggattacggcaagcttttcgaggatctgaaccagataagcatgggtgtactggatcgggtagagttttcagaggtgatggtgatccacaggatgtatgtgaggctagctgatctgaatgtggggcagctcgagggagccgagaaagtgaagcggttgtatgtgtttgcggacgtggtggagctaccagtcgtggaatggcggtggccgccgcaaataccaggatcggtgacggtgatcatattgtgtcgtcttcttcaatggccaactgatgggaggcagtcggacaccgagctccacctgacattcatgaagttgcatgccatacaacgagaggaaaatcggtgggagataaccgcagcagatggcatgaactggggagtttacatacacgcagaggaagtacaggttggcgtgctgacaatgtcatggtcttcggtacttagagtttcggcacttcgctctgttataacctccggctttcgcgccgttagtgtgtttgaggtaccgggaagtgtaaggtccacccttggagctactttaaggcccgatcacgccttatatagtacaactatgcaagccacacccaacgcatcgcatattagtgcttttaaccttcgcatagtttccccgtcggcatatcgtgtttgtcctctccaaaatgacacagatacctacttaggtattccagcagacgtggcggcagttcttccagtagacgtggtgactgatcctaacatcttgctgggcatgcagacaacggtacacattgcggagctagtcaaggcatgtcatccgtcacccgatgttgtgagcgctgtaggggagcacctgaactggctcaacaaactcttactcccacttaaggaatcgactcagttgcaagggaccgaggcctacaacgagtgccttgcgcttttaggtcgcattcaatgtgtcatgaagatggggccgtttgtctcggtagtgccgcagctgcaatacagaatgtatggtagcctcatcagacaaatggcccaggtagcacagaactacgaccaagatttcaggcagctcaagttattcattgcccaaaaccaaatccttggcagctatttgctgcagcagaacaaggcctttgctgacagagaggtgcagatggagagctttcattcagcggtcatttctcaaagaaggcaggagttggacgacgccatcgctaagatggaccgactgagcttgcagatggaggaagaggacagagcaatggagcaagcccgaaaagaaatggaagaaggattgaagcagttccagaatgagcaagttgcaagggctgtgttcgctgttcttaaatctgtagctatgattgcgctcgcattcgtcacggctggtgcaacggctcctggggctgcagcatctgcagcgcaagctgtgaacatagccggtcaagcggcacaagctctgcgaagggtggtggaaattctagaggggctcgaggctgtgatggaggttgtggctgctataaagcaccttgtggatgctctggaccaggtaagtcagattgtggatgcaccacctatgccagacatgccctcggaggcggactggagtatttttgtgaatgagattgaagccgtggcagaggggatgccgacggaagtctcggaggttccggcgtggaaggccaagtgcaagaatgtggctgcactgggtagggagatgtgcatcacggcagaacagatttcccagctccagtatgacatctgggtgcaaggcttgttgcgggatatagctcaaagccacgcagaccggctggcagcgattcaacctgctaatcttaccaactatttggagatggcaatacagatggatatgcggactacgaggatactgatagggctcctcaacataatgcgcatccagaatgcggcacttatgtatgagtaccttctaacgcccacgcagctcactgcatggccgctgagaatggatactgtggccaacttgctcatcacgcacgagagtgctgcactgtcaggattagctcagttagggcccccatcggacttcacgagcaggcatgtagtgaaaggcatacctgtgagcttgcttctagacggtggggattgggaatttgagattcctgtgcaaggtggcatgtccagtttcccttccagctggactcgagtgcggattcggcacctggagatgcactttgtgcaggaggcgagcggtggcggcgagattatccaccagcctgccacccagacggggaccatttacatcctcctgcagggctccactgtcttccatgatcgcagaagggaggaggtgatgacctttcaggcagcggttccgctcaactaccattacgcgtaccgcctcgacactggagaagccactcttacgaacgagccctcggaacagtttgccaacacattcatgcagatgacaccgttcactcactggaggctacgtctgtctgcgtccgcagcggagaataaaggattagcctttcccacagctacagctcccgactccaccactgagattgccatcactttccatgttacggccattagacaaattgactggcggcaagaggaggag

SEQ ID NO: 719 - DNA, 2598 bp, Artificial Sequence
  Synthetic
atggctctcgtggattacggcaagcttttcgaggatctgaaccagataagcatgggtgtactggatcgggtagagttttcagaggtgatggtgatccacaggatgtatgtgaggctagctgatctgaatgtggggcagctcgagggagccgagaaagtgaagcggttgtatgtgtttgcggacgtggtggagctaccagtcgtggaatggcggtggccgccgcaaataccaggatcggtgacggtgatcatattgtgtcgtcttcttcaatggccaactgatgggaggcagtcggacaccgagctccacctgacattcatgaagttgcatgccatacaacgagaggaaaatcggtgggagataaccgcagcagatggcatgaactggggagtttacatacacgcagaggaagtacaggttggcgtgctgacaatgtcatggtcttcggtacttagagtttcggcacttcgctctgttataacctccggctttcgcgccgttagtgtgtttgaggtaccgggaagtgtaaggtccacccttggagctactttaaggcccgatcacgccttatatagtacaactatgcaagccacacccaacgcatcgcatattagtgcttttaaccttcgcatagtttccccgtcggcatatcgtgtttgtcctctccaaaatgacacagatacctacttaggtattccagcagacgtggcggcagttcttccagtagacgtggtgactgatcctaacatcttgctgggcatgcagacaacggtacacattgcggagctagtcaaggcatgtcatccgtcacccgatgttgtgagcgctgtaggggagcacctgaactggctcaacaaactcttactcccacttaaggaatcgactcagttgcaaggaagcgagtcgtacaaggagtgccttgcactcttgggtcgtgttcatgctgcgatgaagatggggccgtttgtctcggtagtgccgcagctgcaatacagaatgtatggtagcctcatcagacaaatggcccaggtagcacagaactacgaccaagatttcaggcagctcaagttattcattgcccaaaaccaaatccttggcagctatttgctgcagcagaacaaggcctttgctgacagagaggtgcagatggagagctttcattcagcggtcatttctcaaagaaggcaggagttggacgacgccatcgctaagatggaccgactgagcttgcagatggaggaagaggacagagcaatggagcaagcccgaaaagaaatggaagaaggattgaagcagttccagaatgagcaagttgcaagggctgtgttcgctgttcttaaatctgtagctatgattgcgctcgcattcgtcacggctggtgcaacggctcctggggctgcagcatctgcagcgcaagctgtgaacatagccggtcaagcggcacaagctctgcgaagggtggtggaaattctagaggggctcgaggctgtgatggaggttgtggctgctataaagcaccttgtggatgctctggaccaggtaagtcagattgtggatgcaccacctatgccagacatgccctcggaggcggactggagtatttttgtgaatgagattgaagccgtggcagaggggatgccgacggaagtctcggaggttccggcgtggaaggccaagtgcaagaatgtggctgcactgggtagggagatgtgcatcacggcagaacagatttcccagctccagtatgacatctgggtgcaaggcttgttgcgggatatagctcaaagccacgcagaccggctggcagcgattcaacctgctaatcttaccaactatttggagatggcaatacagatggatatgcggactacgaggatactgatagggctcctcaacataatgcgcatccagaatgcggcacttatgtatgagtaccttctaacgcccacgcagctcactgcatggccgctgagaatggatactgtggccaacttgctcatcacgcacgagagtgctgcactgtcaggattagctcagttagggcccccatcggacttcacgagcaggcatgtagtgaaaggcatacctgtgagcttgcttctagacggtggggattgggaatttgagattcctgtgcaaggtggcatgtccagtttcccttccagctggactcgagtgcggattcggcacctggagatgcactttgtgcaggaggcgagcggtggcggcgagattatccaccagcctgccacccagacggggaccatttacatcctcctgcagggctccactgtcttccatgatcgcagaagggaggaggtgatgacctttcaggcagcggttccgctcaactaccattacgcgtaccgcctcgacactggagaagccactcttacgaacgagccctcggaacagtttgccaacacattcatgcagatgacaccgttcactcactggaggctacgtctgtctgcgtccgcagcggagaataaaggattagcctttcccacagctacagctcccgactccaccactgagattgccatcactttccatgttacggccattagacaaattgactggcggcaagaggaggag

SEQ ID NO: 720 - DNA, 2563 bp, Artificial Sequence
  Synthetic
atggattacagcacgctttacagggatctgaaccagataagcatgcccctggatcgggtagagttctcagaggtgatggtaatccacaggatgtacttgaggttatctgatctgaatgtgggggagctccccggagccgagagggtgaagcggttgtatgtgttggcagacgtggtggagctcgcaacatttgcgcatccacagttgcttaatacgcggatgccaggatcggtgacggtgatcattctgtgtcgtcttcttcagtttccaactgatgggtcgttcgctgcttggctcgagctgccgttcatggagttgcacacactcatagaacaatacaggtcagagataaaagcagcagatgacgcgaaatggggaacgtatgtacacgcggaggaagtacagctcagcccgctgtttaatgggtggccttatctggttgttgaggcacagcgctgtattataaccgcggccatgcacaatacatttaaccgccctgggtgggttcgctccattactcaatttacaactgatcagtccggtcgggtagataccacactgctcgcacgaacagaattcggccatattgatctaccactcgaaacagattccccaacggcattcagtgtttcacaccgccaaagtacgaatttgcccgtagagtacaccggtattccagtggaggtggtgaccgatcctaacatcttgatgggcatgcaaaccagcgtgcacattgcggagctagtgaaggcatgttacccgtcaccagaattagtgagcgctgtaggggtgcacgtgaattggctcaacgaagtcttgctccgagttgtccagaaggaatctcagttgcaaggaagcgagtcgtacaaggagtgccttgcactcttgggtcgtgttcacgctgcgatgaagatggtgagaattggcttagtagtgccccagctgcaatacagaatgtacggtagcctcatcaaccaaatggcccaagtagcacaaaactacgaccgagaattcaagcaattcaaattattcatcatccaaaatcaaatccttggcagctatttgctgcagcagaacagggcatttgctgagagggagctgcagatggagagctttcatgctgctgtcatttctcaaagaagggaggagttggacaatacattcgcaaagatggaccgattgagcgggcaaatggaggcagagagtagtgcaatggagcaagccaaaaaggaaatggacgaaggattgaggcagttccagaataggcaagttgcgaacgccctctttgccgttcttagcgctgtagctcagattgggcttgcattccttacggctggtgcaacggctcctggagctgtggcgtcggcggggcaagctgtgagcatagcaggtcaggcggcgcaaggtctgcgaagggtggtggaaattctagagcagctggaggctgtgatggaggttgtggctgctgtgaaggacctcgtggattcattggaacaggtaggtcagattgtggacgcaccggtgatgccggaattgccctcagaggcggactggtccatttttgtgaacgaggtggaggccgtggcagagggcatgccaacggaagtctcggaggttccggtgtggagggccaagtgcaagaatgtggctgcactgggtcgggagatgagcatcacggcagtacagatgtcggagctgcagtatgacatctgggtgcaaggcatgatgcgggatatggctcgaagccaggcagacaggctggccgcaattcaacccgcggaccttaccaactatttggagatggctacccagatggatatgcggactacgaggatgctgctggggctcctcaacatattgcgcatccagaatgcggcgctcaggtacgagtatcttctaatgcccacggagctcacaacatggccactgggtatggataccgtgggtgacttgctcatcgcgcaggagaatgctgcactgataggattaatgcagctagggccctcatctgatttcacgagcaggcatgtggtgaaagacatacctgtgaacttgctgctcgatggcgaggattgggagtttgagattcctgtgcaagctggcatgtccagcttcccttccagctggtctcgcgtccgtattcggcacctggagatgcactttgtgaaggaggccagcggtattggtggtgagattatccaccagcctaccacccagactgggaccgtttacatccttctgcagggttccactatcttccatgaccgcagaagagaccaggtgttgccttttcaggccgctgctccgctcaactaccattacgcgtaccgcctcgacaccggcgactccactctcacaaacgaaccctctgaacagtttgccaacaagttcatgcagatgacacccttcacccgttggaggcttcgtctgtctgcgtccgcaaaagagaatgcaggattagcctttcccacggctacagcacttgactccactacccagattgtcatcactttccatgttacggccatcagacaaattgactggcggcacgacgaagagtagc

SEQ ID NO: 721 - DNA, 2601 bp, Artificial Sequence
  Synthetic
atggctctcgtggattacggcaagcttttcgaggatctgaaccagataagcatgggtgtactggatcgggtagagttttcagaggtgatggtgatccacaggatgtatgtgaggctagctgatctgaatgtggggcagctcgagggagccgagaaagtgaagcggttgtatgtgtttgcggacgtggtggagctaccagtcgtggaatggcggtggccgccgcaaataccaggatcggtgacggtgatcatattgtgtcgtcttcttcaatggccaactgatgggaggcagtcggacaccgagctccacctgacattcatgaagttgcatgccatacaacgagaggaaaatcggtgggagataaccgcagcagatggcatgaactggggagtttacatacacgcagaggaagtacaggttggcgtgctgacaatgtcatggtcttcggtacttagagtttcggcacttcgctctgttataacctccggctttcgcgccgttagtgtgtttgaggtaccgggaagtgtaaggtccacccttggagctactttaaggcccgatcacgccttatatagtacaactatgcaagccacacccaacgcatcgcatattagtgcttttaaccttcgcatagtttccccgtcggcatatcgtgtttgtcctctccaaaatgacacagatacctacttaggtattccagcagacgtggcggcagttcttccagtagacgtggtgactgatcctaacatcttgctgggcatgcagacaacggtacacattgcggagctagtcaaggcatgtcatccgtcacccgatgttgtgagcgctgtaggggagcacgtgaattggctcaacgaagtcttgctccgagttgtccagaaggaatctcagttgcaagggaccgaggcctacaacgagtgccttgcgcttttaggtcgcattcaatgtgtcatgaagatggggccgtttgtctcggtagtgccgcagctgcaatacagaatgtatggtagcctcatcagacaaatggcccaggtagcacagaactacgaccaagatttcaggcagctcaagttattcattgcccaaaaccaaatccttggcagctatttgctgcagcagaacaaggcctttgctgacagagaggtgcagatggagagctttcattcagcggtcatttctcaaagaaggcaggagttggacgacgccatcgctaagatggaccgactgagcttgcagatggaggaagaggacagagcaatggagcaagcccgaaaagaaatggaagaaggattgaagcagttccagaatgagcaagttgcaagggctgtgttcgctgttcttaaatctgtagctatgattgcgctcgcattcgtcacggctggtgcaacggctcctggggctgcagcatctgcagcgcaagctgtgaacatagccggtcaagcggcacaagctctgcgaagggtggtggaaattctagaggggctcgaggctgtgatggaggttgtggctgctataaagcaccttgtggatgctctggaccaggtaagtcagattgtggatgcaccacctatgccagacatgccctcggaggcggactggagtatttttgtgaatgagattgaagccgtggcagaggggatgccgacggaagtctcggaggttccggcgtggaaggccaagtgcaagaatgtggctgcactgggtagggagatgtgcatcacggcagaacagatttcccagctccagtatgacatctgggtgcaaggcttgttgcgggatatagctcaaagccacgcagaccggctggcagcgattcaacctgctaatcttaccaactatttggagatggcaatacagatggatatgcggactacgaggatactgatagggctcctcaacataatgcgcatccagaatgcggcacttatgtatgagtaccttctaacgcccacgcagctcactgcatggccgctgagaatggatactgtggccaacttgctcatcacgcacgagagtgctgcactgtcaggattagctcagttagggcccccatcggacttcacgagcaggcatgtagtgaaaggcatacctgtgagcttgcttctagacggtggggattgggaatttgagattcctgtgcaaggtggcatgtccagtttcccttccagctggactcgagtgcggattcggcacctggagatgcactttgtgcaggaggcgagcggtggcggcgagattatccaccagcctgccacccagacggggaccatttacatcctcctgcagggctccactgtcttccatgatcgcagaagggaggaggtgatgacctttcaggcagcggttccgctcaactaccattacgcgtaccgcctcgacactggagaagccactcttacgaacgagccctcggaacagtttgccaacacattcatgcagatgacaccgttcactcactggaggctacgtctgtctgcgtccgcagcggagaataaaggattagcctttcccacagctacagctcccgactccaccactgagattgccatcactttccatgttacggccattagacaaattgactggcggcaagaggaggag

SEQ ID NO: 722 - DNA, 2550 bp, Artificial Sequence
  Synthetic
atggattacagcacgctttacagggatctgaaccagataagcatgcccctggatcgggtagagttctcagaggtgatggtaatccacaggatgtacttgaggttatctgatctgaatgtggggcagctcgagggagccgagagggtgaagcggttgtatgtgtttgcggacgtggtggagctaccagtcgtggaatggcggtggccgccgcaaataccaggatcggtgacggtgatcatattgtgtcgtcttcttcagtttccaactgatgggtcgttcgctgcttggctcgggctgccgttcatggagttgcacacactcatagaacaatacaggtcagagataaaagcagcagatgacgcgaaatggggaacgtatgtacacgcggaggaagtacagctcagcccgctgtttaatgggtggccttatctggttgttgaggcacagcgctgtattataaccgcggccatgcacaatacatttaaccgccctgggtgggttcgctccattactcaatttacaactgatcagtccggtcgggtagataccacactgctcgcacgaacagaattcggccatattgatctaccactcgaaacagattccccaacggcattcagtgtttcacaccgccaaagtacgaatttgcccgtagagtacaccggtattccagtggaggtggtgaccgatcctaacatcttgatgggcatgcaaaccagcgtgcacattgcggagctagtgaaggcatgttacccgtcaccagaattagtgagcgctgtaggggtgcacgtgaattggctcaacgaagtcttgctccgagttgtccagaaggaatctcagttgcaagggaccgaggcctacaacgagtgccttgcgcttttaggtcgcattcaatgtgtcatgaagatggggccgtttgtctcggtagtgccgcagctgcaatacagaatgtatggtagcctcatcagacaaatggcccaggtagcacagaactacgaccaagatttcaggcagctcaagttattcattgcccaaaaccaaatccttggcagctatttgctgcagcagaacaaggcctttgctgacagagaggtgcagatggagagctttcattcagcggtcatttctcaaagaaggcaggagttggacgacgccatcgctaagatggaccgactgagcttgcagatggaggaagaggacagagcaatggagcaagcccgaaaagaaatggaagaaggattgaagcagttccagaatgagcaagttgcaagggctgtgttcgctgttcttaaatctgtagctatgattgcgctcgcattcgtcacggctggtgcaacggctcctggggctgcagcatctgcagcgcaagctgtgaacatagccggtcaagcggcacaagctctgcgaagggtggtggaaattctagaggggctcgaggctgtgatggaggttgtggctgctataaagcaccttgtggatgctctggaccaggtaagtcagattgtggatgcaccacctatgccagacatgccctcggaggcggactggagtatttttgtgaatgagattgaagccgtggcagaggggatgccgacggaagtctcggaggttccggcgtggaaggccaagtgcaagaatgtggctgcactgggtagggagatgtgcatcacggcagaacagatttcccagctccagtatgacatctgggtgcaaggcttgttgcgggatatagctcaaagccacgcagaccggctggcagcgattcaacctgctaatcttaccaactatttggagatggcaatacagatggatatgcggactacgaggatactgatagggctcctcaacataatgcgcatccagaatgcggcacttatgtatgagtaccttctaacgcccacgcagctcactgcatggccgctgagaatggatactgtggccaacttgctcatcacgcacgagagtgctgcactgtcaggattagctcagttagggcccccatcggacttcacgagcaggcatgtagtgaaaggcatacctgtgagcttgcttctagacggtggggattgggaatttgagattcctgtgcaaggtggcatgtccagtttcccttccagctggactcgagtgcggattcggcacctggagatgcactttgtgcaggaggcgagcggtggcggcgagattatccaccagcctgccacccagacggggaccatttacatcctcctgcagggctccactgtcttccatgatcgcagaagggaggaggtgatgacctttcaggcagcggttccgctcaactaccattacgcgtaccgcctcgacactggagaagccactcttacgaacgagccctcggaacagtttgccaacacattcatgcagatgacaccgttcactcactggaggctacgtctgtctgcgtccgcagcggagaataaaggattagcctttcccacagctacagctcccgactccaccactgagattgccatcactttccatgttacggccattagacaaattgactggcggcaagaggaggag

SEQ ID NO: 723 - DNA, 2589 bp, Artificial Sequence
  Synthetic
atggattacagcacgctttacagggatctgaaccagataagcatgcccctggatcgggtagagttctcagaggtgatggtaatccacaggatgtacttgaggttatctgatctgaatgtgggggagctccccggagccgagagggtgaagcggttgtatgtgtttgcggacgtggtggagctaccagtcgtggaatggcggtggccgccgcaaataccaggatcggtgacggtgatcattctgtgtcgtcttcttcaatggccaactgatgggaggcagtcggacaccgagctccacctgacattcatgaagttgcatgccatacaacgagaggaaaatcggtgggagataaccgcagcagatggcatgaactggggagtttacatacacgcagaggaagtacaggttggcgtgctgacaatgtcatggtcttcggtacttagagtttcggcacttcgctctgttataacctccggctttcgcgccgttagtgtgtttgaggtaccgggaagtgtaaggtccacccttggagctactttaaggcccgatcacgccttatatagtacaactatgcaagccacacccaacgcatcgcatattagtgcttttaaccttcgcatagtttccccgtcggcatatcgtgtttgtcctctccaaaatgacacagatacctacttaggtattccagcagacgtggcggcagttcttccagtagacgtggtgaccgatcctaacatcttgatgggcatgcaaaccagcgtgcacattgcggagctagtcaaggcatgtcatccgtcacccgatgttgtgagcgctgtaggggtgcacgtgaattggctcaacgaagtcttgctccgagttgtccagaaggaatctcagttgcaagggaccgaggcctacaacgagtgccttgcgcttttaggtcgcattcaatgtgtcatgaagatggggccgtttgtctcggtagtgccgcagctgcaatacagaatgtatggtagcctcatcagacaaatggcccaggtagcacagaactacgaccaagatttcaggcagctcaagttattcattgcccaaaaccaaatccttggcagctatttgctgcagcagaacaaggcctttgctgacagagaggtgcagatggagagctttcattcagcggtcatttctcaaagaaggcaggagttggacgacgccatcgctaagatggaccgactgagcttgcagatggaggaagaggacagagcaatggagcaagcccgaaaagaaatggaagaaggattgaagcagttccagaatgagcaagttgcaagggctgtgttcgctgttcttaaatctgtagctatgattgcgctcgcattcgtcacggctggtgcaacggctcctggggctgcagcatctgcagcgcaagctgtgaacatagccggtcaagcggcacaagctctgcgaagggtggtggaaattctagaggggctcgaggctgtgatggaggttgtggctgctataaagcaccttgtggatgctctggaccaggtaagtcagattgtggatgcaccacctatgccagacatgccctcggaggcggactggagtatttttgtgaatgagattgaagccgtggcagaggggatgccgacggaagtctcggaggttccggcgtggaaggccaagtgcaagaatgtggctgcactgggtagggagatgtgcatcacggcagaacagatttcccagctccagtatgacatctgggtgcaaggcttgttgcgggatatagctcaaagccacgcagaccggctggcagcgattcaacctgctaatcttaccaactatttggagatggcaatacagatggatatgcggactacgaggatactgatagggctcctcaacataatgcgcatccagaatgcggcacttatgtatgagtaccttctaacgcccacgcagctcactgcatggccgctgagaatggatactgtggccaacttgctcatcacgcacgagagtgctgcactgtcaggattagctcagttagggcccccatcggacttcacgagcaggcatgtagtgaaaggcatacctgtgagcttgcttctagacggtggggattgggaatttgagattcctgtgcaaggtggcatgtccagtttcccttccagctggactcgagtgcggattcggcacctggagatgcactttgtgcaggaggcgagcggtggcggcgagattatccaccagcctgccacccagacggggaccatttacatcctcctgcagggctccactgtcttccatgatcgcagaagggaggaggtgatgacctttcaggcagcggttccgctcaactaccattacgcgtaccgcctcgacactggagaagccactcttacgaacgagccctcggaacagtttgccaacacattcatgcagatgacaccgttcactcactggaggctacgtctgtctgcgtccgcagcggagaataaaggattagcctttcccacagctacagctcccgactccaccactgagattgccatcactttccatgttacggccattagacaaattgactggcggcaagaggaggag

SEQ ID NO: 724 - DNA, 2608 bp, Artificial Sequence
  Synthetic
atggctctcgtggattacggcaagcttttcgaggatctgaaccagataagcatgggtgtactggatcgggtagagttttcagaggtgatggtgatccacaggatgtatgtgaggctagctgatctgaatgtggggcagctcgagggagccgagaaagtgaagcggttgtatgtgtttgcagacgtggtggagctaccagtcgtggaatggcggtggccgccgcaaataccaggatcggtgacggtgatcatattgtgtcgtcttcttcaatggccaactgatgggaggcagtcggacaccgagctccacctgacattcatgaagttgcatgccatacaacgagaggaaaatcggtgggagataaccgcagcagatggcatgaactggggagtttacatacacgcagaggaagtacaggttggcgtgctgacaatgtcatggtcttcggtacttagagtttcggcacttcgctctgttataacctccggctttcgcgccgttagtgtgtttgaggtaccgggaagtgtaaggtccacccttggagctactttaaggcccgatcacgccttatatagtacaactatgcaagccacacccaacgcatcgcatattagtgcttttaaccttcgcatagtttccccgtcggcatatcgtgtttgtcctctccaaaatgacacagatacctacttaggtattccagcagacgtggcggcagttcttccagtagacgtggtgactgatcctaacatcttgctgggcatgcagacaacggtacacattgcggagctagtgaaggcatgtcatccgtcacccgatgttgtgagcgctgtaggggtgcacgtgaattggctcaacgaagtcttgctccgagttgtccagaaggaatctcagttgcaagggaccgaggcctacaacgagtgccttgcgcttttaggtcgcattcaatgtgtcatgaagatggggccgtttgtctcggtagtgccgcagctgcaatacagaatgtacggtagcctcatcaaccaaatggcccaagtagcacaaaactacgaccgagaattcaagcaattcaaattattcatcatccaaaatcaaatccttggcagctatttgctgcagcagaacagggcatttgctgagagggagctgcagatggagagctttcatgctgctgtcatttctcaaagaagggaggagttggacaatacattcgcaaagatggaccgattgagcgggcaaatggaggcagagagtagtgcaatggagcaagccaaaaaggaaatggacgaaggattgaggcagttccagaataggcaagttgcgaacgccctctttgccgttcttagcgctgtagctcagattgggcttgcattccttacggctggtgcaacggctcctggagctgtggcgtcggcggggcaagctgtgagcatagcaggtcaggcggcgcaaggtctgcgaagggtggtggaaattctagagcagctggaggctgtgatggaggttgtggctgctgtgaaggacctcgtggattcattggaacaggtaggtcagattgtggacgcaccggtgatgccggaattgccctcagaggcggactggtccatttttgtgaacgaggtggaggccgtggcagagggcatgccaacggaagtctcggaggttccggtgtggagggccaagtgcaagaatgtggctgcactgggtcgggagatgagcatcacggcagtacagatgtcggagctgcagtatgacatctgggtgcaaggcatgatgcgggatatggctcgaagccaggcagacaggctggccgcaattcaacccgcggaccttaccaactatttggagatggctacccagatggatatgcggactacgaggatgctgctggggctcctcaacatattgcgcatccagaatgcggcgctcaggtacgagtatcttctaatgcccacggagctcacaacatggccactgggtatggataccgtgggtgacttgctcatcgcgcaggagaatgctgcactgataggattaatgcagctagggccctcatctgatttcacgagcaggcatgtggtgaaagacatacctgtgaacttgctgctcgatggcgaggattgggagtttgagattcctgtgcaagctggcatgtccagcttcccttccagctggtctcgcgtccgtattcggcacctggagatgcactttgtgaaggaggccagcggtattggtggtgagattatccaccagcctaccacccagactgggaccgtttacatccttctgcagggttccactatcttccatgaccgcagaagagaccaggtgttgccttttcaggccgctgctccgctcaactaccattacgcgtaccgcctcgacaccggcgactccactctcacaaacgaaccctctgaacagtttgccaacaagttcatgcagatgacacccttcacccgttggaggcttcgtctgtctgcgtccgcaaaagagaatgcaggattagcctttcccacggctacagcacttgactccactacccagattgtcatcactttccatgttacggccatcagacaaattgactggcggcacgacgaagagtagc

SEQ ID NO: 725 - DNA, 2586 bp, Artificial Sequence
  Synthetic
atggattacagcacgctttacagggatctgaaccagataagcatgcccctggatcgggtagagttctcagaggtgatggtaatccacaggatgtacttgaggttatctgatctgaatgtggggcagctcgagggagccgagaaagtgaagcggttgtatgtgtttgcggacgtggtggagctaccagtcgtggaatggcggtggccgccgcaaataccaggatcggtgacggtgatcatattgtgtcgtcttcttcaatggccaactgatgggaggcagtcggacaccgagctccacctgacattcatgaagttgcatgccatacaacgagaggaaaatcggtgggagataaccgcagcagatggcatgaactggggagtttacatacacgcagaggaagtacaggttggcgtgctgacaatgtcatggtcttcggtacttagagtttcggcacttcgctctgttataacctccggctttcgcgccgttagtgtgtttgaggtaccgggaagtgtaaggtccacccttggagctactttaaggcccgatcacgccttatatagtacaactatgcaagccacacccaacgcatcgcatattagtgcttttaaccttcgcatagtttccccgtcggcatatcgtgtttgtcctctccaaaatgacacagatacctacttaggtattccagcagacgtggcggcagttcttccagtagacgtggtgactgatcctaacatcttgctgggcatgcagacaacggtacacattgcggagctagtcaaggcatgtcatccgtcacccgatgttgtgagcgctgtaggggagcacctgaactggctcaacaaactcttactcccacttaaggaatcgactcagttgcaaggaagcgagtcgtacaaggagtgccttgcactcttgggtcgtgttcacgctgcgatgaagatggtgagaattggcttagtagtgccccagctgcaatacagaatgtacggtagcctcatcaaccaaatggcccaagtagcacaaaactacgaccgagaattcaagcaattcaaattattcatcatccaaaatcaaatccttggcagctatttgctgcagcagaacaaggcctttgctgacagagaggtgcagatggagagctttcattcagcggtcatttctcaaagaaggcaggagttggacgacgccatcgctaagatggaccgactgagcttgcagatggaggaagaggacagagcaatggagcaagcccgaaaagaaatggaagaaggattgaagcagttccagaatgagcaagttgcaagggctgtgttcgctgttcttaaatctgtagctatgattgcgctcgcattcgtcacggctggtgcaacggctcctggggctgcagcatctgcagcgcaagctgtgaacatagccggtcaagcggcacaagctctgcgaagggtggtggaaattctagaggggctcgaggctgtgatggaggttgtggctgctataaagcaccttgtggatgctctggaccaggtaagtcagattgtggatgcaccacctatgccagacatgccctcggaggcggactggagtatttttgtgaatgagattgaagccgtggcagaggggatgccgacggaagtctcggaggttccggcgtggaaggccaagtgcaagaatgtggctgcactgggtagggagatgtgcatcacggcagaacagatttcccagctccagtatgacatctgggtgcaaggcttgttgcgggatatagctcaaagccacgcagaccggctggcagcgattcaacctgctaatcttaccaactatttggagatggcaatacagatggatatgcggactacgaggatactgatagggctcctcaacataatgcgcatccagaatgcggcacttatgtatgagtaccttctaacgcccacgcagctcactgcatggccgctgagaatggatactgtggccaacttgctcatcacgcacgagagtgctgcactgtcaggattagctcagttagggcccccatcggacttcacgagcaggcatgtagtgaaaggcatacctgtgagcttgcttctagacggtggggattgggaatttgagattcctgtgcaaggtggcatgtccagtttcccttccagctggactcgagtgcggattcggcacctggagatgcactttgtgcaggaggcgagcggtggcggcgagattatccaccagcctgccacccagacggggaccatttacatcctcctgcagggctccactgtcttccatgatcgcagaagggaggaggtgatgacctttcaggcagcggttccgctcaactaccattacgcgtaccgcctcgacactggagaagccactcttacgaacgagccctcggaacagtttgccaacacattcatgcagatgacaccgttcactcactggaggctacgtctgtctgcgtccgcagcggagaataaaggattagcctttcccacagctacagctcccgactccaccactgagattgccatcactttccatgttacggccattagacaaattgactggcggcaagaggaggag

SEQ ID NO: 726 - DNA, 2595 bp, Artificial Sequence
  Synthetic
atggctctcgtggattacggcaagcttttcgaggatctgaaccagataagcatgcccctggatcgggtagagttctcagaggtgatggtaatccacaggatgtacttgaggttatctgatctgaatgtgggggagctccccggagccgagagggtgaagcggttgtatgtgtttgcggacgtggtggagctaccagtcgtggaatggcggtggccgccgcaaataccaggatcggtgacggtgatcatattgtgtcgtcttcttcaatggccaactgatgggaggcagtcggacaccgagctccacctgacattcatgaagttgcatgccatacaacgagaggaaaatcggtgggagataaccgcagcagatggcatgaactggggagtttacatacacgcagaggaagtacaggttggcgtgctgacaatgtcatggtcttcggtacttagagtttcggcacttcgctctgttataacctccggctttcgcgccgttagtgtgtttgaggtaccgggaagtgtaaggtccacccttggagctactttaaggcccgatcacgccttatatagtacaactatgcaagccacacccaacgcatcgcatattagtgcttttaaccttcgcatagtttccccgtcggcatatcgtgtttgtcctctccaaaatgacacagatacctacttaggtattccagcagacgtggcggcagttcttccagtagacgtggtgactgatcctaacatcttgctgggcatgcagacaacggtacacattgcggagctagtcaaggcatgtcatccgtcacccgatgttgtgagcgctgtaggggagcacctgaactggctcaacaaactcttactcccacttaaggaatcgactcagttgcaaggaagcgagtcgtacaaggagtgccttgcactcttgggtcgtgttcacgctgcgatgaagatggtgagaattggcttagtagtgccccagctgcaatacagaatgtacggtagcctcatcaaccaaatggcccaggtagcacaaaactacgaccgagaattcaagcaattcaaattattcatcatccaaaatcaaatccttggcagctatttgctgcagcagaacaaggcctttgctgacagagaggtgcagatggagagctttcattcagcggtcatttctcaaagaaggcaggagttggacgacgccatcgctaagatggaccgactgagcttgcagatggaggaagaggacagagcaatggagcaagcccgaaaagaaatggaagaaggattgaagcagttccagaatgagcaagttgcaagggctgtgttcgctgttcttaaatctgtagctatgattgcgctcgcattcgtcacggctggtgcaacggctcctggggctgcagcatctgcagcgcaagctgtgaacatagccggtcaagcggcacaagctctgcgaagggtggtggaaattctagaggggctcgaggctgtgatggaggttgtggctgctataaagcaccttgtggatgctctggaccaggtaagtcagattgtggatgcaccacctatgccagacatgccctcggaggcggactggagtatttttgtgaatgagattgaagccgtggcagaggggatgccgacggaagtctcggaggttccggcgtggaaggccaagtgcaagaatgtggctgcactgggtagggagatgtgcatcacggcagaacagatttcccagctccagtatgacatctgggtgcaaggcttgttgcgggatatagctcaaagccacgcagaccggctggcagcgattcaacctgctaatcttaccaactatttggagatggcaatacagatggatatgcggactacgaggatactgatagggctcctcaacataatgcgcatccagaatgcggcacttatgtatgagtaccttctaacgcccacgcagctcactgcatggccgctgagaatggatactgtggccaacttgctcatcacgcacgagagtgctgcactgtcaggattagctcagttagggcccccatcggacttcacgagcaggcatgtagtgaaaggcatacctgtgagcttgcttctagacggtggggattgggaatttgagattcctgtgcaaggtggcatgtccagtttcccttccagctggactcgagtgcggattcggcacctggagatgcactttgtgcaggaggcgagcggtggcggcgagattatccaccagcctgccacccagacggggaccatttacatcctcctgcagggctccactgtcttccatgatcgcagaagggaggaggtgatgacctttcaggcagcggttccgctcaactaccattacgcgtaccgcctcgacactggagaagccactcttacgaacgagccctcggaacagtttgccaacacattcatgcagatgacaccgttcactcactggaggctacgtctgtctgcgtccgcagcggagaataaaggattagcctttcccacagctacagctcccgactccaccactgagattgccatcactttccatgttacggccattagacaaattgactggcggcaagaggaggag

SEQ ID NO: 727 - DNA, 2601 bp, Artificial Sequence
  Synthetic
atggctctcgtggattacggcaagcttttcgaggatctgaaccagataagcatgggtgtactggatcgggtagagttttcagaggtgatggtgatccacaggatgtatgtgaggctagctgatctgaatgtggggcagctccccggagccgagagggtgaagcggttgtatgtgtttgcggacgtggtggagctaccagtcgtggaatggcggtggccgccgcaaataccaggatcggtgacggtgatcattctgtgtcgtcttcttcaatggccaactgatgggaggcagtcggacaccgagctccacctgacattcatgaagttgcatgccatacaacgggaggaaaatcagtgggagataaccgcagcagatggcatgaactggggagtttacatacacgcagaggaagtacaggttggcgtgctgacaatgtcatggtcttcggtacttagagtttcggcacttcgctctgttataacctccggctttcgcgccgttagtgtgtttgaggtaccgggaagtgtaaggtccacccttggagctactttaaggcccgatcacgccttatatagtacaactatgcaagccacacccaacgcatcgcatattagtgcttttaaccttcgcatagtttccccgtcggcatatcgtgtttgtcctctccaaaatgacacagatacctacttaggtattccagcagacgtggcggcagttcttccagtagacgtggtgactgatcctaacatcttgctgggcatgcagacaacggtacacattgcggagctagtcaaggcatgtcatccgtcacccgatgttgtgagcgctgtaggggagcacctgaactggctcaacgaagtcttgctccgagttgtccagaaggaatctcagttgcaagggaccgaggcctacaacgagtgccttgcgcttttaggtcgcattcaatgtgtcatgaagatggggccgtttgtctcggtagtgccgcagctgcaatacagaatgtacggtagcctcatcaaccaaatggcccaagtagcacaaaactacgaccaagatttcaggcaattcaaattattcatcatccaaaatcaaatccttggcagctatttgctgcagcagaacaaggcctttgctgacagagaggtgcagatggagagctttcattcagcggtcatttctcaaagaaggcaggagttggacgacgccatcgctaagatggaccgactgagcttgcagatggaggaagaggacagagcaatggagcaagcccgaaaagaaatggaagaaggattgaagcagttccagaatgagcaagttgcaagggctgtgttcgctgttcttaaatctgtagctatgattgcgctcgcattcgtcacggctggtgcaacggctcctggggctgcagcatctgcagcgcaagctgtgaacatagccggtcaagcggcacaagctctgcgaagggtggtggaaattctagaggggctcgaggctgtgatggaggttgtggctgctataaagcaccttgtggatgctctggaccaggtaagtcagattgtggatgcaccacctatgccagacatgccctcggaggcggactggagtatttttgtgaatgagattgaagccgtggcagaggggatgccgacggaagtctcggaggttccggcgtggaaggccaagtgcaagaatgtggctgcactgggtagggagatgtgcatcacggcagaacagatttcccagctccagtatgacatctgggtgcaaggcttgttgcgggatatagctcaaagccacgcagaccggctggcagcgattcagcctgctaatcttaccaactatttggagatggcaatacagatggatatgcggactacgaggatactgatagggctcctcaacataatgcgcatccagaatgcggcacttatgtatgagtaccttctaacgcccacgcagctcactgcatggccgctgagaatggatactgtggccaacttgctcatcacgcacgagagtgctgcactgtcaggattagctcagttagggcccccatcggacttcacgagcaggcatgtagtgaaaggcatacctgtgagcttgcttctagacggtggggattgggaatttgagattcctgtgcaaggtggcatgtccagtttcccttccagctggactcgagtgcggattcggcacctggagatgcactttgtgcaggaggcgagcggtggcggcgagattatccaccagcctgccacccagacggggaccatttacatcctcctgcagggctccactgtcttccatgatcgcagaagggaggaggtgatgacctttcaggcagcggttccgctcaactaccattacgcgtaccgcctcgacactggagaagccactcttacgaacgagccctcggaacagtttgccaacacattcatgcagatgacaccgttcactcactggaggctacgtctgtctgcgtccgcagcggagaataaaggattagcctttcccacagctacagctcccgactccaccactgagattgccatcactttccatgttacggccattagacaaattgactggcggcaagaggaggag

SEQ ID NO: 728 - protein, 866 aa, Artificial Sequence
  Synthetic
MALVDYGKLFEDLNQISMGVLDRVEFSEVMVIHRMYVRLADLNVGQLEGAEKVKRLYVFADVVELPVVEWRWPPQIPGSVTVIILCRLLQWPTDGRQSDTELHLTFMKLHAIQREENRWEITAADGMNWGVYIHAEEVQVGVLTMSWSSVLRVSALRSVITSGFRAVSVFEVPGSVRSTLGATLRPDHALYSTTMQATPNASHISAFNLRIVSPSAYRVCPLQNDTDTYLGIPADVAAVLPVDVVTDPNILLGMQTTVHIAELVKACHPSPDVVSAVGEHLNWLNKLLLPLKESTQLQGTEAYNECLALLGRIQCVMKMGPFVSVVPQLQYRMYGSLIRQMAQVAQNYDQDFRQLKLFIAQNQILGSYLLQQNKAFADREVQMESFHSAVISQRRQELDDAIAKMDRLSLQMEEEDRAMEQARKEMEEGLKQFQNEQVARAVFAVLKSVAMIALAFVTAGATAPGAAASAAQAVNIAGQAAQALRRVVEILEGLEAVMEVVAAIKHLVDALDQVSQIVDAPPMPDMPSEADWSIFVNEIEAVAEGMPTEVSEVPAWKAKCKNVAALGREMCITAEQISQLQYDIWVQGLLRDIAQSHADRLAAIQPANLTNYLEMAIQMDMRTTRILIGLLNIMRIQNAALMYEYLLTPTQLTAWPLRMDTVANLLITHESAALSGLAQLGPPSDFTSRHVVKGIPVSLLLDGGDWEFEIPVQGGMSSFPSSWTRVRIRHLEMHFVQEASGGGEIIHQPATQTGTIYILLQGSTVFHDRRREEVMTFQAAVPLNYHYAYRLDTGEATLTNEPSEQFANTFMQMTPFTHWRLRLSASAAENKGLAFPTATAPDSTTEIAITFHVTAIRQIDWRQEEE

SEQ ID NO: 729 - protein, 866 aa, Artificial Sequence
  Synthetic
MALVDYGKLFEDLNQISMGVLDRVEFSEVMVIHRMYVRLADLNVGQLEGAEKVKRLYVFADVVELPVVEWRWPPQIPGSVTVIILCRLLQWPTDGRQSDTELHLTFMKLHAIQREENRWEITAADGMNWGVYIHAEEVQVGVLTMSWSSVLRVSALRSVITSGFRAVSVFEVPGSVRSTLGATLRPDHALYSTTMQATPNASHISAFNLRIVSPSAYRVCPLQNDTDTYLGIPADVAAVLPVDVVTDPNILLGMQTTVHIAELVKACHPSPDVVSAVGEHLNWLNKLLLPLKESTQLQGSESYKECLALLGRVHAAMKMGPFVSVVPQLQYRMYGSLIRQMAQVAQNYDQDFRQLKLFIAQNQILGSYLLQQNKAFADREVQMESFHSAVISQRRQELDDAIAKMDRLSLQMEEEDRAMEQARKEMEEGLKQFQNEQVARAVFAVLKSVAMIALAFVTAGATAPGAAASAAQAVNIAGQAAQALRRVVEILEGLEAVMEVVAAIKHLVDALDQVSQIVDAPPMPDMPSEADWSIFVNEIEAVAEGMPTEVSEVPAWKAKCKNVAALGREMCITAEQISQLQYDIWVQGLLRDIAQSHADRLAAIQPANLTNYLEMAIQMDMRTTRILIGLLNIMRIQNAALMYEYLLTPTQLTAWPLRMDTVANLLITHESAALSGLAQLGPPSDFTSRHVVKGIPVSLLLDGGDWEFEIPVQGGMSSFPSSWTRVRIRHLEMHFVQEASGGGEIIHQPATQTGTIYILLQGSTVFHDRRREEVMTFQAAVPLNYHYAYRLDTGEATLTNEPSEQFANTFMQMTPFTHWRLRLSASAAENKGLAFPTATAPDSTTEIAITFHVTAIRQIDWRQEEE

SEQ ID NO: 730 - protein, 853 aa, Artificial Sequence
  Synthetic
MDYSTLYRDLNQISMPLDRVEFSEVMVIHRMYLRLSDLNVGELPGAERVKRLYVLADVVELATFAHPQLLNTRMPGSVTVIILCRLLQFPTDGSFAAWLELPFMELHTLIEQYRSEIKAADDAKWGTYVHAEEVQLSPLFNGWPYLVVEAQRCIITAAMHNTFNRPGWVRSITQFTTDQSGRVDTTLLARTEFGHIDLPLETDSPTAFSVSHRQSTNLPVEYTGIPVEVVTDPNILMGMQTSVHIAELVKACYPSPELVSAVGVHVNWLNEVLLRVVQKESQLQGSESYKECLALLGRVHAAMKMVRIGLVVPQLQYRMYGSLINQMAQVAQNYDREFKQFKLFIIQNQILGSYLLQQNRAFAERELQMESFHAAVISQRREELDNTFAKMDRLSGQMEAESSAMEQAKKEMDEGLRQFQNRQVANALFAVLSAVAQIGLAFLTAGATAPGAVASAGQAVSIAGQAAQGLRRVVEILEQLEAVMEVVAAVKDLVDSLEQVGQIVDAPVMPELPSEADWSIFVNEVEAVAEGMPTEVSEVPVWRAKCKNVAALGREMSITAVQMSELQYDIWVQGMMRDMARSQADRLAAIQPADLTNYLEMATQMDMRTTRMLLGLLNILRIQNAALRYEYLLMPTELTTWPLGMDTVGDLLIAQENAALIGLMQLGPSSDFTSRHVVKDIPVNLLLDGEDWEFEIPVQAGMSSFPSSWSRVRIRHLEMHFVKEASGIGGEIIHQPTTQTGTVYILLQGSTIFHDRRRDQVLPFQAAAPLNYHYAYRLDTGDSTLTNEPSEQFANKFMQMTPFTRWRLRLSASAKENAGLAFPTATALDSTTQIVITFHVTAIRQIDWRHDEE

SEQ ID NO: 731 - protein, 867 aa, Artificial Sequence
  Synthetic
MALVDYGKLFEDLNQISMGVLDRVEFSEVMVIHRMYVRLADLNVGQLEGAEKVKRLYVFADVVELPVVEWRWPPQIPGSVTVIILCRLLQWPTDGRQSDTELHLTFMKLHAIQREENRWEITAADGMNWGVYIHAEEVQVGVLTMSWSSVLRVSALRSVITSGFRAVSVFEVPGSVRSTLGATLRPDHALYSTTMQATPNASHISAFNLRIVSPSAYRVCPLQNDTDTYLGIPADVAAVLPVDVVTDPNILLGMQTTVHIAELVKACHPSPDVVSAVGEHVNWLNEVLLRVVQKESQLQGTEAYNECLALLGRIQCVMKMGPFVSVVPQLQYRMYGSLIRQMAQVAQNYDQDFRQLKLFIAQNQILGSYLLQQNKAFADREVQMESFHSAVISQRRQELDDAIAKMDRLSLQMEEEDRAMEQARKEMEEGLKQFQNEQVARAVFAVLKSVAMIALAFVTAGATAPGAAASAAQAVNIAGQAAQALRRVVEILEGLEAVMEVVAAIKHLVDALDQVSQIVDAPPMPDMPSEADWSIFVNEIEAVAEGMPTEVSEVPAWKAKCKNVAALGREMCITAEQISQLQYDIWVQGLLRDIAQSHADRLAAIQPANLTNYLEMAIQMDMRTTRILIGLLNIMRIQNAALMYEYLLTPTQLTAWPLRMDTVANLLITHESAALSGLAQLGPPSDFTSRHVVKGIPVSLLLDGGDWEFEIPVQGGMSSFPSSWTRVRIRHLEMHFVQEASGGGEIIHQPATQTGTIYILLQGSTVFHDRRREEVMTFQAAVPLNYHYAYRLDTGEATLTNEPSEQFANTFMQMTPFTHWRLRLSASAAENKGLAFPTATAPDSTTEIAITFHVTAIRQIDWRQEEE

SEQ ID NO: 732 - protein, 850 aa, Artificial Sequence
  Synthetic
MDYSTLYRDLNQISMPLDRVEFSEVMVIHRMYLRLSDLNVGQLEGAERVKRLYVFADVVELPVVEWRWPPQIPGSVTVIILCRLLQFPTDGSFAAWLGLPFMELHTLIEQYRSEIKAADDAKWGTYVHAEEVQLSPLFNGWPYLVVEAQRCIITAAMHNTFNRPGWVRSITQFTTDQSGRVDTTLLARTEFGHIDLPLETDSPTAFSVSHRQSTNLPVEYTGIPVEVVTDPNILMGMQTSVHIAELVKACYPSPELVSAVGVHVNWLNEVLLRVVQKESQLQGTEAYNECLALLGRIQCVMKMGPFVSVVPQLQYRMYGSLIRQMAQVAQNYDQDFRQLKLFIAQNQILGSYLLQQNKAFADREVQMESFHSAVISQRRQELDDAIAKMDRLSLQMEEEDRAMEQARKEMEEGLKQFQNEQVARAVFAVLKSVAMIALAFVTAGATAPGAAASAAQAVNIAGQAAQALRRVVEILEGLEAVMEVVAAIKHLVDALDQVSQIVDAPPMPDMPSEADWSIFVNEIEAVAEGMPTEVSEVPAWKAKCKNVAALGREMCITAEQISQLQYDIWVQGLLRDIAQSHADRLAAIQPANLTNYLEMAIQMDMRTTRILIGLLNIMRIQNAALMYEYLLTPTQLTAWPLRMDTVANLLITHESAALSGLAQLGPPSDFTSRHVVKGIPVSLLLDGGDWEFEIPVQGGMSSFPSSWTRVRIRHLEMHFVQEASGGGEIIHQPATQTGTIYILLQGSTVFHDRRREEVMTFQAAVPLNYHYAYRLDTGEATLTNEPSEQFANTFMQMTPFTHWRLRLSASAAENKGLAFPTATAPDSTTEIAITFHVTAIRQIDWRQEEE

SEQ ID NO: 733 - protein, 863 aa, Artificial Sequence
  Synthetic
MDYSTLYRDLNQISMPLDRVEFSEVMVIHRMYLRLSDLNVGELPGAERVKRLYVFADVVELPVVEWRWPPQIPGSVTVIILCRLLQWPTDGRQSDTELHLTFMKLHAIQREENRWEITAADGMNWGVYIHAEEVQVGVLTMSWSSVLRVSALRSVITSGFRAVSVFEVPGSVRSTLGATLRPDHALYSTTMQATPNASHISAFNLRIVSPSAYRVCPLQNDTDTYLGIPADVAAVLPVDVVTDPNILMGMQTSVHIAELVKACHPSPDVVSAVGVHVNWLNEVLLRVVQKESQLQGTEAYNECLALLGRIQCVMKMGPFVSVVPQLQYRMYGSLIRQMAQVAQNYDQDFRQLKLFIAQNQILGSYLLQQNKAFADREVQMESFHSAVISQRRQELDDAIAKMDRLSLQMEEEDRAMEQARKEMEEGLKQFQNEQVARAVFAVLKSVAMIALAFVTAGATAPGAAASAAQAVNIAGQAAQALRRVVEILEGLEAVMEVVAAIKHLVDALDQVSQIVDAPPMPDMPSEADWSIFVNEIEAVAEGMPTEVSEVPAWKAKCKNVAALGREMCITAEQISQLQYDIWVQGLLRDIAQSHADRLAAIQPANLTNYLEMAIQMDMRTTRILIGLLNIMRIQNAALMYEYLLTPTQLTAWPLRMDTVANLLITHESAALSGLAQLGPPSDFTSRHVVKGIPVSLLLDGGDWEFEIPVQGGMSSFPSSWTRVRIRHLEMHFVQEASGGGEIIHQPATQTGTIYILLQGSTVFHDRRREEVMTFQAAVPLNYHYAYRLDTGEATLTNEPSEQFANTFMQMTPFTHWRLRLSASAAENKGLAFPTATAPDSTTEIAITFHVTAIRQIDWRQEEE

SEQ ID NO: 734 - protein, 868 aa, Artificial Sequence
  Synthetic
MALVDYGKLFEDLNQISMGVLDRVEFSEVMVIHRMYVRLADLNVGQLEGAEKVKRLYVFADVVELPVVEWRWPPQIPGSVTVIILCRLLQWPTDGRQSDTELHLTFMKLHAIQREENRWEITAADGMNWGVYIHAEEVQVGVLTMSWSSVLRVSALRSVITSGFRAVSVFEVPGSVRSTLGATLRPDHALYSTTMQATPNASHISAFNLRIVSPSAYRVCPLQNDTDTYLGIPADVAAVLPVDVVTDPNILLGMQTTVHIAELVKACHPSPDVVSAVGVHVNWLNEVLLRVVQKESQLQGTEAYNECLALLGRIQCVMKMGPFVSVVPQLQYRMYGSLINQMAQVAQNYDREFKQFKLFIIQNQILGSYLLQQNRAFAERELQMESFHAAVISQRREELDNTFAKMDRLSGQMEAESSAMEQAKKEMDEGLRQFQNRQVANALFAVLSAVAQIGLAFLTAGATAPGAVASAGQAVSIAGQAAQGLRRVVEILEQLEAVMEVVAAVKDLVDSLEQVGQIVDAPVMPELPSEADWSIFVNEVEAVAEGMPTEVSEVPVWRAKCKNVAALGREMSITAVQMSELQYDIWVQGMMRDMARSQADRLAAIQPADLTNYLEMATQMDMRTTRMLLGLLNILRIQNAALRYEYLLMPTELTTWPLGMDTVGDLLIAQENAALIGLMQLGPSSDFTSRHVVKDIPVNLLLDGEDWEFEIPVQAGMSSFPSSWSRVRIRHLEMHFVKEASGIGGEIIHQPTTQTGTVYILLQGSTIFHDRRRDQVLPFQAAAPLNYHYAYRLDTGDSTLTNEPSEQFANKFMQMTPFTRWRLRLSASAKENAGLAFPTATALDSTTQIVITFHVTAIRQIDWRHDEE

SEQ ID NO: 735 - protein, 862 aa, Artificial Sequence
  Synthetic
MDYSTLYRDLNQISMPLDRVEFSEVMVIHRMYLRLSDLNVGQLEGAEKVKRLYVFADVVELPVVEWRWPPQIPGSVTVIILCRLLQWPTDGRQSDTELHLTFMKLHAIQREENRWEITAADGMNWGVYIHAEEVQVGVLTMSWSSVLRVSALRSVITSGFRAVSVFEVPGSVRSTLGATLRPDHALYSTTMQATPNASHISAFNLRIVSPSAYRVCPLQNDTDTYLGIPADVAAVLPVDVVTDPNILLGMQTTVHIAELVKACHPSPDVVSAVGEHLNWLNKLLLPLKESTQLQGSESYKECLALLGRVHAAMKMVRIGLVVPQLQYRMYGSLINQMAQVAQNYDREFKQFKLFIIQNQILGSYLLQQNKAFADREVQMESFHSAVISQRRQELDDAIAKMDRLSLQMEEEDRAMEQARKEMEEGLKQFQNEQVARAVFAVLKSVAMIALAFVTAGATAPGAAASAAQAVNIAGQAAQALRRVVEILEGLEAVMEVVAAIKHLVDALDQVSQIVDAPPMPDMPSEADWSIFVNEIEAVAEGMPTEVSEVPAWKAKCKNVAALGREMCITAEQISQLQYDIWVQGLLRDIAQSHADRLAAIQPANLTNYLEMAIQMDMRTTRILIGLLNIMRIQNAALMYEYLLTPTQLTAWPLRMDTVANLLITHESAALSGLAQLGPPSDFTSRHVVKGIPVSLLLDGGDWEFEIPVQGGMSSFPSSWTRVRIRHLEMHFVQEASGGGEIIHQPATQTGTIYILLQGSTVFHDRRREEVMTFQAAVPLNYHYAYRLDTGEATLTNEPSEQFANTFMQMTPFTHWRLRLSASAAENKGLAFPTATAPDSTTEIAITFHVTAIRQIDWRQEEE

SEQ ID NO: 736 - protein, 865 aa, Artificial Sequence
  Synthetic
MALVDYGKLFEDLNQISMPLDRVEFSEVMVIHRMYLRLSDLNVGELPGAERVKRLYVFADVVELPVVEWRWPPQIPGSVTVIILCRLLQWPTDGRQSDTELHLTFMKLHAIQREENRWEITAADGMNWGVYIHAEEVQVGVLTMSWSSVLRVSALRSVITSGFRAVSVFEVPGSVRSTLGATLRPDHALYSTTMQATPNASHISAFNLRIVSPSAYRVCPLQNDTDTYLGIPADVAAVLPVDVVTDPNILLGMQTTVHIAELVKACHPSPDVVSAVGEHLNWLNKLLLPLKESTQLQGSESYKECLALLGRVHAAMKMVRIGLVVPQLQYRMYGSLINQMAQVAQNYDREFKQFKLFIIQNQILGSYLLQQNKAFADREVQMESFHSAVISQRRQELDDAIAKMDRLSLQMEEEDRAMEQARKEMEEGLKQFQNEQVARAVFAVLKSVAMIALAFVTAGATAPGAAASAAQAVNIAGQAAQALRRVVEILEGLEAVMEVVAAIKHLVDALDQVSQIVDAPPMPDMPSEADWSIFVNEIEAVAEGMPTEVSEVPAWKAKCKNVAALGREMCITAEQISQLQYDIWVQGLLRDIAQSHADRLAAIQPANLTNYLEMAIQMDMRTTRILIGLLNIMRIQNAALMYEYLLTPTQLTAWPLRMDTVANLLITHESAALSGLAQLGPPSDFTSRHVVKGIPVSLLLDGGDWEFEIPVQGGMSSFPSSWTRVRIRHLEMHFVQEASGGGEIIHQPATQTGTIYILLQGSTVFHDRRREEVMTFQAAVPLNYHYAYRLDTGEATLTNEPSEQFANTFMQMTPFTHWRLRLSASAAENKGLAFPTATAPDSTTEIAITFHVTAIRQIDWRQEEE

SEQ ID NO: 737 - protein, 867 aa, Artificial Sequence
  Synthetic
MALVDYGKLFEDLNQISMGVLDRVEFSEVMVIHRMYVRLADLNVGQLPGAERVKRLYVFADVVELPVVEWRWPPQIPGSVTVIILCRLLQWPTDGRQSDTELHLTFMKLHAIQREENQWEITAADGMNWGVYIHAEEVQVGVLTMSWSSVLRVSALRSVITSGFRAVSVFEVPGSVRSTLGATLRPDHALYSTTMQATPNASHISAFNLRIVSPSAYRVCPLQNDTDTYLGIPADVAAVLPVDVVTDPNILLGMQTTVHIAELVKACHPSPDVVSAVGEHLNWLNEVLLRVVQKESQLQGTEAYNECLALLGRIQCVMKMGPFVSVVPQLQYRMYGSLINQMAQVAQNYDQDFRQFKLFIIQNQILGSYLLQQNKAFADREVQMESFHSAVISQRRQELDDAIAKMDRLSLQMEEEDRAMEQARKEMEEGLKQFQNEQVARAVFAVLKSVAMIALAFVTAGATAPGAAASAAQAVNIAGQAAQALRRVVEILEGLEAVMEVVAAIKHLVDALDQVSQIVDAPPMPDMPSEADWSIFVNEIEAVAEGMPTEVSEVPAWKAKCKNVAALGREMCITAEQISQLQYDIWVQGLLRDIAQSHADRLAAIQPANLTNYLEMAIQMDMRTTRILIGLLNIMRIQNAALMYEYLLTPTQLTAWPLRMDTVANLLITHESAALSGLAQLGPPSDFTSRHVVKGIPVSLLLDGGDWEFEIPVQGGMSSFPSSWTRVRIRHLEMHFVQEASGGGEIIHQPATQTGTIYILLQGSTVFHDRRREEVMTFQAAVPLNYHYAYRLDTGEATLTNEPSEQFANTFMQMTPFTHWRLRLSASAAENKGLAFPTATAPDSTTEIAITFHVTAIRQIDWRQEEE

SEQ ID NO: 738 - DNA, 2538 bp, Polystichium tsus-simense
atggattacagcacgctttacagggatctgaaccaggtaagggtgcctgtggatagggcagagttctcagaggtgatggtgatccataggatgtatgtgaggttatctgatctggatgtgggggagctcgttggagccgagagagtgaagcggttgtacgtgtttgcggacgtggtggagcttgttccgcagactgtgtggtttagacaaattcaaatgccaggatcggtgacggtgatcatattgtgtcgtcttcttcaatttccaactgttgggtcgcaagctgaaactctccagctgcccttcatgaggttgcaggccatagtcaaagagcaaaataggtcggagataacagcagcagatgggatgaagtggggaacgtacatacacgggaacgaagtgcagcttcgttctaacaattccagatttgacgtctgggcacctcgctcgattataacctcagccattcacaatgtgctcaacgaacctgggagattagcttccaatactgtaattgcaagggctcagggagcagtgactactacgcgaatgtcagcctggctcagtcatcaaggtttcgtactccccacagtttccccaacggcatttagcgttttacctctccaaagtacgaatgtatccttcacaagtattcctgtggaggttgtcactgatcctaacatcttgctgggcatgcagaccaccctgcacattgcagagctagtcaaggtatgtcacccatcacccgacattgtgagcgctgtagcggagcacgcgatttggctcagcaaagtcttgcttcaagttgtccagaacgaatctcagttgcaagggaccgagtcctacaacgagtgccttgcgctcttgggtcgtgttcaatctgtgataaagatggggagatttggctcagtagtgccccagctgcaataccgaatgtacggcagcctcatcaatcaaatggctcaagtagcacaaaattacgaccgagaattcaagcaattcaagttgttcattatccaaaaccaaatccttggcagctacttgctgcagcagaacaaggcatttgctgacagggagctgcagatggagagctttcattctgcagtcatttctcatagagcccaggagttggacactgccatcgcaaagatggaccgattgagcttgcaaatggaggaagagaatagagcaatggagcaagccgaaaaggaaatgaacgaaggattgaggaggttccagaacgagcaagttgcaagggccatattttcagttcttagagctgtagctatgattgggcttgcatttgtcacgggtggtgcaacggctcctgcagctgtggcatccgcggggcaagctgtgagcatagccggtcaggccgcacaagctctgcgaagggtggtggaaattctagagggcctggcggctgtgatggaggtcgtggctgctgtgaaggaacttgtggcttcattggaacaggtaggtcagattgtggacgcaccggagatgccggacatgccctcggaggcggactggtccatttttgtgaatgagattgaggctgtggcagaggggatgccgacggaagtctcggaggttccgacgtggaaggccaagtgcaagaatgtggctgcactgggtagggagatgagcatcacggcagtacagatttctgagctccagtatcacatctgggtgcaaggcttgatgcgggatatagctcgaagtcaggcagacaggctggcggcgattcaacccgtggaccttacaaactatttggagatggcaacacagatggatatgcggactacgaggatgctgatagggctcctcaacatgctgcgcatccagaatgcggcactcatgtacgagtaccttctaacgcccatggagctcacagcatggccgctggaaatggataccatggccaacttactcatcgagcaggagaattctgcactgttaggattaattcagctagggccctcatcggatttcacaagcaggcatgtggtgaaaggcatacctgtgagcttgctgctcgatggtgaggattgggagtttgagatccctgtgcaacgtggcatgtccagcttcccttttagctggactcgagtccggattcggcacctggagatgcactttgtgcaggaggcgagcagcggcggcgagattatccatcagcctgccacccagacagggaccgtttacatcctcctgcagggctccactatcttccatgaccgcagaagagacgaggtgatgacctttcaggcagcggacccgctcaactaccaatacgcgtaccgtctcgacactggcgaagccacccttaccaacgagccctcagaacagtttgccaacacgttcatgcagatgacacccttcactcggtggaggcttcgtctctctgcgtccgccaaagagaatgcagggttagcctttcccacagctacagctcccgactccactaccgagattgtcatcacgttccacgttacggccattagacaaattgactggaggcaggaggtggaggag

SEQ ID NO: 739 - DNA, 2538 bp, Polystichium tsus-simense
atggattacagcacgctttacagggatctgaaccaggtaagggtgcctgtggatagggcagagttctcagaggtgatggtgatccataggatgtatgtgaggttatctgatctggatgtgggggagctcgttggagccgagagagtgaagcggttgtacgtgtttgcggacgtggtggagcttgttccgcagactgtgtggtttagacaaattcaaatgccaggatcggtgacggtgatcatattgtgtcgtcttcttcaatttccaactgttgggtcgcaagctgaaactctccagctgcccttcatgaggttgcaggccatagtcaaagagcaaaataggtcggagataacagcagcagatgggatgaagtggggaacgtacatacacgggaacgaagtgcagcttcgttctaacaattccagatttgacgtctgggcacctcgctcgattataacctcagccgttcacaatgtgctcaacgaaccggggagattagcttccaatactgtaattgcaagggctcagggagcagtgactactacgcgaatgtcagcctggctcagtcatcaaggtttcgtactccccacagtttccccaacggcatttagcgttttacctctccaaagtacgaatgtatccttcacaagtattcctgtggaggttgtcactgatcctaacatcttgctgggcatgcagaccaccctgcacattgcagagctagtcaaggtatgtcacccatcacccgacattgtgagcgctgtagcggagcacgcgatttggctcagcaaagtcttgcttcaagttgtccagaacgaatctcagttgcaagggaccgagtcctacaacgagtgccttgcgctcttgggtcgtgttcaatctgtgataaagatggggagatttggctcagtagtgccccagctgcaataccgaatgtacggcagcctcatcaatcaaatggctcaagtagcacaaaattacgaccgagaattcaagcaattcaagttgttcattatccaaaaccaaatccttggcagctacttgctgcagcagaacaaggcatttgctgacagggagctgcagatggagagctttcattctgcagtcatttctcatagagcccaggagttggacactgccatcgcaaagatggaccgattgagcttgcaaatggaggaagagaatagagcaatggagcaagccgaaaaggaaatgaacgaaggattgaggaggttccagaacgagcaagttgcaagggccatattttcagttcttagagctgtagctatgattgggcttgcatttgtcacgggtggtgcaacggctcctgcagctgtggcatccgcggggcaagctgtgagcatagccggtcaggccgcacaagctctgcgaagggtggtggaaattctagagggcctggcggctgtgatggaggtcgtggctgctgtgaaggaacttgtggcttcattggaacaggtaggtcagattgtggacgcaccggagatgccggacatgccctcggaggcggactggtccatttttgtgaatgagattgaggctgtggcagaggggatgccgacggaagtctcggaggttccgacgtggaaggccaagtgcaagaatgtggctgcactgggtagggagatgagcatcacggcagtacagatttctgagctccagtatcacatctgggtgcaaggcttgatgcgggatatagctcgaagtcaggcagacaggctggcggcgattcaacccgtggaccttacaaactatttggagatggcaacacagatggatatgcggactacgaggatgctgatagggctcctcaacatgctgcgcatccagaatgcggcactcatgtacgagtaccttctaacgcccatggagctcacagcatggccgctggaaatggataccatggccaacttactcatcgagcaggagaattctgcactgttaggattaattcagctagggccctcatcggatttcacaagcaggcatgtggtgaaaggcatacctgtgagcttgctgctcgatggtgaggattgggagtttgagatccctgtgcaacgtggcatgtccagcttcccttttagctggactcgagtccggattcggcacctggagatgcactttgtgcaggaggcgagcagcggcggcgagattatccatcagcctgccacccagacagggaccgtttacatcctcctgcagggctccactatcttccatgaccgcagaagagacgaggtgatgacctttcaggcagcggacccgctcaactaccaatacgcgtaccgtctcgacactggcgaagccacccttaccaacgagccctcagaacagtttgccaacacgttcatgcagatgacacccttcactcggtggaggcttcgtctctctgcgtccgccaaagagaatgcagggttagcctttcccacagctacagctcccgactccactaccgagattgtcatcacgttccacgttacggccattagacaaattgactggaggcaggaggtggaggag

SEQ ID NO: 740 - DNA, 2673 bp, Polystichium tsus-simense
atgacgatggcggcaattactgcacctcggaagtacagcgagctgtacaaagatttgaaccagataagcgagaggattaggctggatcagatggagttctcggaggtgatggtgatccataggatgtttataaagctggaggagttggacttagggtatctcgaaggagcggagagggtgaagcgcttgtacgtttttgcagatgtggtggaggtggaagaaggtggcaactttattgaggtgggcccattagcgagactgcctgggtcgatcgtggtagtcatactatgccgcgtcctgaaagtgggagtcgtcatgaacaattatctcaataatgccatgcgcgtgcagctcccgcacatgaagttgcgtttggtggaggtcacaacccagcccacaggtactaagctgcacatacatcgtgcagatgcagaagattatcaatatcctgccctctgcatacacgccagtgtcatacaatcttccatccgtctcgcaagcaccaatcgtcctcccacctaccctatccctcttcgattctttacctttatgcccgacagaggatccggagatgttgttttctcctccgaatctcggtccctgattgatgagcctgtcaatatcttctatgtatactcccatatgcctgaatttcgtcgttcactccccgtcccggaggccgccacacttgacccggcctcgctatccgatgattggtattatgttcatcttagccgtgtgaactctgtgatgtcgagctatgttgcggctgaaggagagctggaaccggcattctcactattgaaacccaaaatcccgttcgccgtactaacagatcctaacattttgctcgccatgcagaccagcctccttatcgcggagctagtggagcttgctcacccttcagcagacacagctgatgctgtagccaagcacgtggaatggctcagcaaaatcttgcttcaggctgtgtcgacggatgaggaagggatgttaaatccatctcatgatgagcacctcgcgctcttattccgtgcacaatacctgatgaagatgatgccagggaggacgcgcagcctcgtagtaccacaactgcagtatgacgtttatagcaacctcatcaatcgaatggctcaagtggccgaaagctacgaccaatcactaaggcagtttaaactcttcattgagcaaaacaagattcttggcagctacttgctacaacaaaataaggccttcgctgacagggaaagggatatggatgtttttcattccgagcttatctctcaacggaagattgaactggataacaccttactcaagatggatcaattaagcttacaaatggagactcaaagagaagacatggaccaagccaaaaatgacatggatgccggattgcgggaattccaaaatcgacaagttgcagcagctatgtttgccgtgatcggtgctatcgctgcgattggtcttgcctttgtaactggtggtgccactgctcctgccgccatggtagcagcaaagaccgccgtgacagcagcaggtgcggctgcacgggcgctggagcgagtgatagagatcttggattccttacaagcagtgatggagatggtctctctcataaaggagctggtgagttcgctggaagagataggtcaacttgtggaggcaccagagatgccagagatgccgacagaggcggactggttcatttttgagaacgagatagagggggtggcagagcagatgccaacagaggtgtcggaggtatcggcgtggaagacgaagtgcaagaatgtggcagtgttggggcgggagatgatcactacggcgtcttacatttcggagctgcaatacgacatcaaggtgcagggcatgctgcaggagattgccagaagccatgcgaatcggctgtcgagcatccaggcaacagatctgagcaactatacagagatggtgacacagatggacatgcggaccacacgaatgttggtggcgctcatcaaggtggtgcacatgcagaatgcagcactgatgtaccagtgcctatcaccgcccacatatgtgaatgcatggccagtgacaatggagacagtgtggaccatgctggtgcagcacgagcatgcagcggttctgggattgatgaggctagggccctccttcgatttcatgcgcacgtatgtggtggaggggattcctgtgcagctgctgcttgatggggaggattgggagttcgacattccagtggaagattacacaacgttcccgtccacatggtctcgcgtgcgtattcatcacttggaaatgaagtttgtgcaagccgcagatgtgcatcagcctatcactgatactggcacagtttacatgcttctgcagggctctcgcatcttccgcgaccgcaaccgagccgatgccattcattatgaggctgccatgtcgcttgactaccactatgcctaccgccttgacacaggagagaccaccctctccaatctgccctcccaagattttaccagaactttcatgcgcatgacgcccttcactaactggaggctccgtctgtctgcctctgctgaagaaaacaaagggctccgttttcccacggctacatctgccggctccactacccagattgccgtcattttctatatctcagctatcaggaaaatttctttc

SEQ ID NO: 741 - DNA, 2679 bp, Polystichium tsus-simense
atgacgatggcggcaactgcgcctcgggagtacagcgaactgtacaaggatttgaaccagataagcgagaggattaggctggatcagatggagttctcggaggtgatggtgatccacaggatgtttataaagctggaggagttggacttagggcatctcgaaggagcggagagggtgaagcgcttgtgcgtatttgcagatgtggtggaggtggaagaaggtggcaactttattgacgtggggccagtagcgagattgcctgggtcgatcatggtagtcatactatgccgcgtcctgaaagtcggagtcgtcatgagcgacttttatgtcaataatgccatgcgcctgcagctcccgcacatgaagttgcgtttggtggaggtcacaactcagcccacaggcactaagctgcacatacatcgtgcagatgcagaagattatcaatatcctgccctctgcatacacgccagtgtcatacaatcctccatccgtctcagaagcagctccaataatcgtcctcccaccttccctatccctcttcgattctttaactttaggcccgacagaggatccaacgatgtcgttttctcctccgaatctcggtccctgattgatgagcctgtcaatatcttctatgtatactcccatatgcctgcatttcttcatgcactccccatcccggaggcggccacaattgacccggcctcgctatccagtgattggtattatgtccatctcagccgtgtgaactctgtgttgtcgagctctgttgcggctgaaggagagctggaaccggcattctcactattgaaaccgaaaatcccattcgccgtactaacagatcctaacattttgctcgccatgcagaccagcctccttatcgcagagctagtggagcttgctcacccttcagcagacacagctgatgccgtagccaagcacgtggaatggctcagcaaaatcttgcttcaggctgtgtcgacagatgaggaagggatgttaaatccatctcatgatgagcacctcgcgctcttattccgtgcacaatacctgatgaagatgatgccagggaggacgcgcagcctcgtagtaccacaactgcagtatgacgtttacagcaacctcatcaatcgaatggctcaagtggccgaaagctacgaccaatcactaaggcagtttaaactcttcattgagcaaaacaagattcttggcagctacttgctacaacaaaataaggccttcgctgacagggaaagggatatggatgtttttcattccgagcttatctctcaacggaagattgaactggataacaccttactcaagatggatcaattaagcttacaaatggagactcaaagagaagacatggaccaagccaaaaatgacatggatgccggattgcgggaattccaaaatcgacaagttgcagcagctatgtttgccgtgatcggtgctatcgctgcgattggtcttgcctttgtaaccggtggtgccactgctcctgccgccatggtagcagcaaagaccgccgtgacagcagcgggtgcggctgcacgggcactggagcgagtgatagagatcttggattccttacaagcagtgatggagatggtctctctcataaaggagctggtgagttcgctggaagagataggtcaacttgtggacgcaccagagatgccagagatgccgacagaggcggactggttcatttttgagaacgagatagagggggtggcagagcagatgccaacagaggtgtcggaggtatcggcgtggaaaacgaagtgcaagaatgtggcagtgttggggcgggagatgatcactacggcgtcttatatttcggagctgcaatacgacatcaaggtgcaggcaatgctgcaggagattgccagaagccatgcgaatcggctgtcgagcatccaggcaacagatctgagcaactatacagagatggtgacacagatggacatgcggaccacacgaatgttggtggcgctcatcaaggtggtgcacatgcagaatgcagcactgatgtaccagtgcctatcaccgcccacatatgtgaatgcatggccagtgacaatggagacagtgtggaccatgctggtgcagcacgagcatgcagcggttctgggattgatgaggctagggccctccttcgatttcatgcgcacgtatgtggtggaggggattcctgtgcagctgctgcttgatggggaggattgggagttcgacattccagtggaagattacacaacgttcccgtccacatggtctcgtgtgcgtattcatcacttggaaatgaagtttgtgcaagccgcagatgtgcatcagcctatcactgataccggcacagtttacatgcttctccagggctctcgcatcttccgcgaccgcaaccgagccgatgccattcattacgaggctgccatgtcgcttgactaccactatgcctaccgccttgacacaggagagaccaccctctccaatctgccctcccaagatttcaccagaactttcatgcgcatgacgcccttcacgaactggaggctccgtctgtctgcctctgctgaagaaaacaaagggctccgttttcccacggctacatctgccggctccactacccagattgccgtcattttctatatctcagctatcaggaaaatttctttt

SEQ ID NO: 742 - DNA, 2553 bp, Rumohra adiantiformis
atggattacagcactctttacacggatctgaaccagataagcatgcccctggatcgggtagagttctcagaggtgatggtaatccacaggatgtacttgaggttatctgatctgaatgtgggggagctccccggagccgagagagtgaagcggttgtatgtgtttgcggatgtggtggagctcgcaacatttgcgtatccacagtttcttcatacgcggatgccaggatcggtgacggtgatcattctgtgtcgtcttcttcagtttccaactgatgggtcgttccctgcttggctcgagctgccgttcatggagttacacacactcatagaacaacacaggtcagagataaaagcagcagatgacgcgaactggggaacgtatgtacacgcggaggaagtacagctcagcccgctgtttaatgggtggccttatttggttgttgaggcacagcgctgtattataaccgcggccatgcacaatacatttaaccgcactgggtgggttcgctccgttactcaatttataaatgatcagtccggtcgggtagaaaccacactgctcgcacgaacagaattcggccatatttatctcccactcgagacagattccccaacggcattcagtgtttcacaccgccaaattacgaatttgcccgtagagtacaccggtattccagtagaggtggtgaccgatcctaacatcttgatgggcatgcagactagcgtgcacattgcggagctagtgaaggcatgttacccgtcaccagaattagtgagcgctgtaggggtgcacgtgaattggctcaacgaagtcttgctccgagttgtccagaacgaatctcagttgcaagggaccgaggcctacaacgagtgccttgcgcttttgggtcgcattcaatgtgtcatgaagatggggccgtttgtctcggtagtgccgcagctgcaatacagaatgtatggtagccttatcagacaaatggcccaggtagcacagaactacgaccaagatttcaggcagctcaagttattcattgcccaaaaccaaatccttggcagctatttgctgcagcagaacaaggcatttgctgacagagaggtgcagatggagagctttcattcagcggtcatttctcaaagaaggcaggagttggacgacgccatcgctaagatggaccgactgagcttgcagatggaggaagaggacagagcaatggagcaagcccgaaaagaaatggaagaaggattgaagcagttccagaatgagcaagttgcaagggctgtgttcgctgttcttaaatctgtagctatgattgcgctcgcattcgtcacggctggtgcaacggctcctggggctgcagcatccgcagcgcaagctgtgagcatagccgttcaggccgcacaaggtcttcaaagggtggtggaaattctagaggggctggaggctgtgatggaggttgtggctgctataaaggaccttgtgggtgctctggaccaggtaagtcagattgtggatgcaccacctatgccagacatgccctcggaggcggactggagtatttttgtgaatgagattgaagccgtcgcagaggggatgccgacggaagtctcggaggttccggcgtggaaggccaagtgcaagaatgtggctgcactgggtagggagatgtgcatcacggcagaacagatttcccagctccagtatgacatctgggtgcaaggcttgttgcgggaaatagctcaaagccacgcagaccggctggcagcgattcaacctgctaatcttaccaactatttggagatggcaatacagatggatatgcggactacgaggatactgatagggctcctcaacataatgcgcatccagaatgcggcacttatgtatgagtaccttctaacgcccacgcagctcactgcatggccgctgagaatggatactgtggccaacttgctcatcacgcaggagagtgctgcactgtcaggattagctcagttagggcccccatcggacttcacgagcaggcatgtagtgaaagccatacctgtgagcttgcttctagacggtaaggattgggaatttgagattcctgtgcaaggtggcatgtccagtttcccttccagctggactcgagtgcggattcggcacctggagatgcactttgtgcaggaggcgagcggtggtggcgagattatccaccagcctgccacccagacggggaccgtttacatcctcctgcagggctccactgtcttccatgatcgcagaagggaggaggtgatgacctttcaggcagcggttccgctcaactaccattacgcgtaccgccttgacactggagaagccactcttacgaacgagccctcggaacagtttgccaacacattcatgcagatgacaccgttcactcactggaggctacgtctgtctgcgtccgcagcggagaatgaaggattagcctttcccacagctacagctcccgactccaccactgagattgccatcactttccatgttacggccattagacaaattgactggcggcaagaggag

SEQ ID NO: 743 - DNA, 2553 bp, Rumohra adiantiformis
atggattacagcactctttacacggatctgaaccagataagcatgcccctggatcgggtagagttctcagaggtgatggtaatccacaggatgtacttgaggttatctgatctgaatgtgggggagctccccggagccgagagagtgaagcggttgtatgtgtttgcggatgtggtggagctcgcaacatttgcgtatccacagtttcttcatacgcggatgccaggatcggtgacggtgatcattctgtgtcgtcttcttcagtttccaactgatgggtcgttccctgcttggctcgagctgccgttcatggagttacacacactcatagaacaacacaggtcagagataaaagcagcagatgacgcgaactggggaacgtatgtacacgcggaggaagtacagctcagcccgctgtttaatgggtggccttatttggttgttgaggcacagcgctgtattataaccgcggccatgcacaatacatttaaccgcactgggtgggttcgctccgttactcaatttataaatgatcagtccggtcgggtagaaaccacactgctcgcacgaacagaattcggccatatttatctcccactcgagacagattccccaacggcattcagtgtttcacaccgccaaattacgaatttgcccgtagagtacaccggtattccagtagaggtggtgaccgatcctaacatcttgatgggcatgcagactagcgtgcacattgcggagctagtgaaggcatgttacccgtcaccagaattagtgagcgctgtaggggtgcacgtgaattggctcaacgaagtcttgctccgagttgtccagaacgaatctcagttgcaagggaccgaggcctacaacgagtgccttgcgcttttgggtcgcattcaatgtgtcatgaagatggggccgtttgtctcggtagtgccgcagctgcaatacagaatgtatggtagccttatcagacaaatggcccaggtagcacagaactacgaccaagatttcaggcagctcaagttattcattgcccaaaaccaaatccttggcagctatttgctgcagcagaacaaggcatttgctgacagagaggtgcagatggagagctttcattcagcggtcatttctcaaagaaggcaggagttggacgacgccatcgctaagatggaccgactgagcttgcagatggaggaagaggacagagcaatggagcaagcccgaaaagaaatggaagaaggattgaagcagttccagaatgagcaagttgcaagggctgtgttcgctgttcttaaatctgtagctatgattgcgctcgcattcgtcacggctggtgcaacggctcctggggctgcagcatccgcagcgcaagctgtgagcatagccggtcaggccgcacaaggtcttcaaagggtggtggaaattctagaggggctggaggctgtgatggaggttgtggctgctataaaggaccttgtgggtgctctggaccaggtaagtcagattgtggatgcaccacctatgccagacatgccctcggaggcggactggagtatttttgtgaatgagattgaagccgtcgcagaggggatgccgacggaagtctcggaggttccggcgtggaaggccaagtgcaagaatgtggctgcactgggtagggagatgtgcatcacggcagaacagatttcccagctccagtatgacatctgggtgcaaggcttgttgcgggaaatagctcaaagccacgcagaccggctggcagcgattcaacctgctaatcttaccaactatttggagatggcaatacagatggatatgcggactacgaggatactgatagggctcctcaacataatgcgcatccagaatgcggcacttatgtatgagtaccttctaacgcccacgcagctcactgcatggccgctgagaatggatactgtggccaacttgctcatcacgcaggagagtgctgcactgtcaggattagctcagttagggcccccatcggacttcacgagcaggcatgtagtgaaagccatacctgtgagcttgcttctagacggtaaggattgggaatttgagattcctgtgcaaggtggcatgtccagtttcccttccagctggactcgagtgcggattcggcacctggagatgcactttgtgcaggaggcgagcggtggtggcgagattatccaccagcctgccacccagacggggaccgtttacatcctcctgcagggctccactgtcttccatgatcgcagaagggaggaggtgatgacctttcaggcagcggttccgctcaactaccattacgcgtaccgccttgacactggagaagccactcttacgaacgagccctcggaacagtttgccaacacattcatgcagatgacaccgttcactcactggaggctacgtctgtctgcgtccgcagcggagaatgaaggattagcctttcccacagctacagctcccgactccaccactgagattgccatcactttccatgttacggccattagacaaattgactggcggcaagaggag

SEQ ID NO: 744 - DNA, 2703 bp, Rumohra adiantiformis
atggctgcctccgctgctgctattcccgactacaaggagctgtacagagatttgaaccagataagtgagaggatgaggctggatcagatggatttctcggaggtgatggtgatccaccgcatgtatataaggctggaggagctagacttggggcatctggagggagccgacaaggtgaagcgcttgtacgtgcttgcagatgtggtggaggtggaagaaggtggcaacttcattgagcaagggcctgtagcaagattaccaggctccatcttggttgtcatactctgtagagtcctgcttgtgggcatcgtcatcaacgtgcatagtaatggtgaaaattttaataatgccatgcgcctccagcttccacacttgaagctgcgcgcggtcgagatcagcagcagcaccgacagcaactttaagctggagatgcatcgtgttgatcagacagcaggcgagtacaaccaatatcctgcccttaccgtaaacgcggatcttgtacagtgccgcatgcggtgggttattcatcgaccaccgatcacttccgtcagtttgtctcctatattcgtcgcttttatgccagaccgaggatctggagacgtcatcttttcctccgagtctcggtccatggttgatcgacctgttcagatgttttctgtctactctcacgtccctcgttttattcaaagccgtcccctcccactcccagaggaggtcacaatagacctgtcatcatgggagcccaaggaattttactctctctttgtcagtacagctcccacagtttctttgagcaaaagtgaagcagtagcaggagacctggagccagcgttctcgatattgaaaagaactgttcctgttgtcgtgctgacagatcccaacattttactggccatgcaggccagcctacttatcgcggaactagtgcagattgctcacccttcaccagacacagctgatgctgtagccaagcatgtggaatggctcaacaagctcttgattcaggcggcatcagacacggagggcactccagctcatcacgagtacctggcgctcttgttccgtgcacagtacgtcatgaagaagataggaaggacacgtcacctcgtagtgccgcaattgcaatacgacgtttatagtggtctcatcaatcgaatggctcaagtagctgagagttatgaccaatcactcaggcaatttaaactcttcattcaacaaaacaagattcttgggagctatctgctacagcaaaacagggcctttgctgacaaggaaagggacatggatgtattttattccgagcttatctctcaaagggaggttgaattgcaaagcaccctactaaaaatggatcaactgagctcacagatggagacacaacgcgaagacatggagcaagcgcaaaaagagatggaggaaggattgcgaagattccaaaatagagcagttgcaaatgctatgtttgccgtaattggagctgtggctgcaattggtcttgcattcctaaccggtggtgcaactgctcccggagctatggcagcagcagggaatgctgtgacggcagcgggtcaggctgccagggcgctgcaaagagtgctagatattttggaaggcttgcaagtagtgatggaagtgctgtctattatcaaggaactagtcgcttctttgcaagatctaggtcagcttgtggatgcacccgagatgccggaaatgccactggagtcggactggtacatttttgagaactctattgaggaagtggcggaggggatgccggaggaagtgtcagaggtaacggcatggaagaccaagtgcaagaatgtggcggtgctgggccgagagatgatcaccactgcagtatacatatcgcagctaatgtatgatatcaaggtgcagggcatgctgcaggagattgccaaaagccatgcgcaacggttggagaacatccaagcagcggatctgcaaggctatacagagatggtgacacagatggacatgcggaccacgcgcatgttggtggaactgatcaaggtggtgtatatgcagaatgcagcgcttatgtaccagagtttatcaccacccacagcagtgaatgcatggcccgtgacgatggagacagtgtggagcattctactgcagcatgaccatgctgctttgctggggttgctgaggctagggccttcctttgatttcatgcgcacctacacggtggaggatgttccggtgagcctgttgcttgatggtgaagactggcaattcgagatccctgtgcgagattacacagtctttccctccacctggtcgcgcgtgcgcattcatcacttggagatgaaatttgtcaaagctgctcatgtccaccagcccatcactgatacaggctccatttacgtgcttctgcagggctcgcgcatcttccgcgatcgcaacgaagatgaaaccattgattatgaggctgccctgccgcttgactaccactacgcctaccgccttgacacaggggagaccaccctttccaatctgccctctcaagaattcaccaagaccttcttgcgcatgacgcccttctccaacgcctggagattacgtctgtcttcctctgctgaagaaaacaaagggctggcctttcccactgctacggctgccgactccactacccagattgctatcaccttctacgtcaccgctatccggcgcatttctttc

SEQ ID NO: 745 - DNA, 2703 bp, Rumohra adiantiformis
atggctgcctccgctgctgctattcccgactacaaggagctgtacagagatttgaaccagataagtgagaggatgaggctggatcagatggatttctcggaggtgatggtgatccaccgcatgtatataaggctggaggagctagacttggggcatctggagggagccgacaaggtgaagcgcttgtacgtgcttgcagatgtggtggaggtggaagaaggtggcaacttcattgagcaagggcctgtagcaagattaccaggctccatcttggttgtcatactctgtagagtcctgcttgtgggcatcgtcatcaacgtgcatagtaatggtgaaaattttaataatgccatgcgcctccagcttccacacttgaagctgcgcgcggtcgagatcagcagcagcaccgacagcaactttaagctggagatgcatcgtgttgatcagacagcaggcgagtacaaccaatatcctgcccttaccgtaaacgcggatcttgtacagtgccgcatgcggtgggttattcatcgaccaccgatcacttccgtcagtttgtctcctagattcgtcgcttttatgccagaccgaggatctggagacgtcatcttttcctccgagtctcggtccatggttgatcgacctgttcagatgttttctgtctactctcacgtccctcgttttattcaaagccgtcccctcccactcccagaggaggtcacaatagacctgtcatcatgggagcccaaggaattttactctctctttgtcagtacagctcccacagtttctttgagcaaaagtgaagcagtagcaggagacctggagccagcgttctcgatattgaaaagaactgttcctgttgtcgtgctgacagatcccaacattttactggccatgcaggccagcctacttatcgcggaactagtgcagattgctcacccttcaccagacacagctgatgctgtagccaagcatgtggaatggctcaacaagctcttgattcaggcggcatcagacacggagggcactccagctcatcacgagtacctggcgctcttgttccgtgcacagtacgtcatgaagaagataggaaggacacgtcacctcgtagtgccgcaattgcaatacgacgtttatagtggtctcatcaatcgaatggctcaagtagctgagagttatgaccaatcactcaggcaatttaaactcttcattcaacaaaacaagattcttgggagctatctgctacagcaaaacagggcctttgctgacaaggaaagggacatggatgtattttattccgagcttatctctcaaagggaggttgaattgcaaagcaccctactaaaaatggatcaactgagctcacagatggagacacaacgcgaagacatggagcaagcgcaaaaagagatggaggaaggattgcgaagattccaaaatagagcagttgcaaatgctatgtttgccgtaattggagctgtggctgcaattggtcttgcattcctaaccggtggtgcaactgctcccggagctatggcagcagcagggaatgctgtgacggcagcgggtcaggctgccagggcgctgcaaagagtgctagatattttggaaggcttgcaagtagtgatggaagtgctgtctattatcaaggaactagtcgcttctttgcaagatctaggtcagcttgtggatgcacccgagatgccggaaatgccactggagtcggactggtacatttttgagaactctattgaggaagtggcggaggggatgccggaggaagtgtcagaggtaacggcatggaagaccaagtgcaagaatgtggcggtgctgggccgagagatgatcaccactgcagtatacatatcgcagctaatgtatgatatcaaggtgcagggcatgctgcaggagattgccaaaagccatgcgcaacggttggagaacatccaagcagcggatctgcaaggctatacagagatggtgacacagatggacatgcggaccacgcgcatgttggtggaactgatcaaggtggtgtatatgcagaatgcagcgcttatgtaccagagtttatcaccacccacagcagtgaatgcatggcccgtgacgatggagacagtgtggagcattctactgcagcatgaccatgctgctttgctggggttgctgaggctagggccttcctttgatttcatgcgcacctacacggtggaggatgttccggtgagcctgttgcttgatggtgaagactggcaattcgagatccctgtgcgagattacacagtctttccctccacctggtcgcgcgtgcgcattcatcacttggagatgaaatttgtcaaagctgctcatgtccaccagcccatcactgatacaggctccatttacgtgcttctgcagggctcgcgcatcttccgcgatcgcaacgaagatgaaaccattgattatgaggctgccctgccgcttgactaccactacgcctaccgccttgacacaggggagaccaccctttccaatctgccctctcaagaattcaccaagaccttcttgcgcatgacgcccttctccaacgcctggagattacgtctgtcttcctctgctgaagaaaacaaagggctggcctttcccactgctacggctgccgactccactacccagattgctatcaccttctacgtcaccgctatccggcgcatttctttc

SEQ ID NO: 746 - DNA, 2559 bp, Asplenium trichomanes
atggattacagcacgctttacagggatctgaaccagataagcatgcctgtggatcacgtagagttctcagaggtgatggtgatccatagaatgtatgtgaggttatctgatctggatgtgggggagctcgctggagcagagaaagtgaagcggctgtacttgtttgccgatgtggtggagcttgcaccggagcttgcaccggggaaacggacgcaaatgccaggatcgatcacggtgatcatattgtgtcgtcttcttcaatttccaactgatgggtcgcgagctgcaactctccagctgccgttcatgaagttgcatgccatactcagagagcgatataggtcagagataacagcagcagatggcacgaattggggaacgtacatccacggagacgaagtacaggtcagcccgctgtatactaacaattcggtacttccggtttgggcagatcgctctattataacctcagcctttcacaatgtgcttgacgaacctggtagagtaatttccagtactagtattacaatggctcaggcagcaccgaataatacgcgtatgacagccgaacccggttgggtctttggtaatcgttttctactctacacagtttcttcgacggcattcagtgttttacctctccaaagtacgaatatatccttcacaagcattccggtagaggtggtggctgatcctaacatcttgctgggcatgcagaccactgtgcacattgctgagctagtcaaggcatgtcgcccgtcacccgacatagtgagcgctgtagggcagcacgtgatttggctcaacaaagtcttgctccatgttgtgcagaacgaatctcagttgcaagggaccgaatcctacaacgagtgccttgcacttttgggtcgtgttcaatctgtgatgaagatcggcagatctggctcagtagtgccccagctgcaatacagaatgtatggtagcctcatcaaacaaatggcccaagcagcacaaaactatgaccaagaattcaggcagttcaagttattcatcatccaaaaccaaatcctgggcagctatttgctgcagcagaacaaggcatttgccgacagggagctgcagatggagagctttcattcagcggtcatttctcaaagaatgcaggagttggacactgccatcgcaaagatggaccgattgagcttgcaaatggaggaagagaacaaagcaatggagcaagcccagagggagatggacgaaggattgaggaggttccggaatgaacaagtcgcaagggccgtattttctgttcttagagctgtagctatgattgccctcgcattcgtcacgggtggtgcaacggctcctggagctgcggcgtccgcggggcaagccgtgagcatagcaggtcaggccgcacaagctctgcaaagggtggtggaaattctagatcggctggaggcggtgatggaggttgtggctgctgtgaaggaccttgtggattcattggaacaggtaggtcagattgtggaggcaccggtgatgccggacatgccctcggaggcggactggtccatttttgtgaatgagatcgaggctgtcgcagaggggatgccgacagaagtctcggaggttccggcgtggaaggccaagtgcaagaatgtggctgcactgggtagggagatgagcatcacggcagtacagatttctgagctccagtatgacatctgggtgcacggcttgatgcgggacatggctcgaagtcaggcagacaggctggcggcaattcaacccgcagaccttaccaactatttggagatggcaacacagatggatatgcggactacaaggatgctactagggctgctcaacatgctgcacatccagaatgcggcactcatgtacgagtaccttctgacgcccacagagctcacagcatggccgctgggcatggatatcgtggccaacttgctcatcgcgcaggagaatgctgcactgttaggattagttcagctagggcccccatcggatttcacgagcaagcatgtggtgaaaggcatacctgtgagcttgctgctcgacggtgaggattgggagttcgagatccctgtggaaggtggcatgtccagcttcccttctagctggactcgcgtacggattcggcacctggagatgcactttgtgcaggagatgagcggtggcagcgagattatccaccagcctgccacccagacggggactgtttacatcctcctgcagggctccactaccttccatgaccgcagaagggacgaggtgatgacctttcaggcagcggctccgctcaactaccattacgcgtaccgccttgacactggcgaagccactcttacgaacgagccctcggaacagtttgccaacacattcatgcagatgacacccttcacgcgctggaggcttcgtctctctgcgtctgccgcagagaatgcaggattaggctttcccacagctacagctcccgactccacgaccgagatagtcatcacgttccatgttacggccattagacaaattgactggcggcacgaggaggaggaggag

SEQ ID NO: 747 - DNA, 2481 bp, Asplenium trichomanes
atggattacagcacgctttacagggatctgaaccagataagcatgcctgtggatcacgtagagttctcagaggtgatggtgatccatagaatgtatgtgaggttatctgatctggatgtgggggagctcgctggagcagagaaagtgaagcggctgtacttgtttgccgatgtggtggagcttgcaccggagcttgcaccggggaaacggacgcaaatgccaggatcgatcacggtgatcatattgtgtcgtcttcttcaatttccaactgatgggtcgcgagctgcaactctccagctgccgttcatgaagttgcatgccatactcagagagcgatataggtcagagataacagcagcagatggcacgaattggggaacgtacatccacggagacgaagtacaggtcagcccgctgtatactaacaattcggtacttccggtttgggcagatcgctctattataacctcagcctttcacaatgtgcttgacgaacctggtagagtaatttccagtactagtattacaatggctcaggcagcaccgaataatacgcgtatgacagccgaacccggttgggtctttggtaatcgttttctactctacacagtttcttcgacggcattcagtgttttacctctccaaagtacgaatatatccttcacaagcattccggtagaggtggtggctgatcctaacatcttgctgggcatgcagaccactgtgcacattgctgagctagtcaaggtgcagaacgaatctcagttgcaagggaccgaatcctacaacgagtgccttgcacttttgggtcgtgttcaatctgtgatgaagatcggcagatctggctcagtagtgccccagctgcaatacagaatgtatggtagcctcatcaaacaaatggcccaagcagcacaaaactatgaccaagaattcaggcagttcaagttattcatcatccaaaaccaaatcctgggcagctatttgctgcagcagaacaaggcatttgccgacagggagctgcagatggagagctttcattcagcggtcatttctcaaagaatgcaggagttggacactgccatcgcaaagatggaccgattgagcttgcaaatggaggaagagaacaaagcaatggagcaagcccagagggagatggacgaaggattgaggaggttccggaatgaacaagtcgcaagggccgtattttctgttcttagagctgtagctatgattgccctcgcattcgtcacgggtggtgcaacggctcctggagctgcggcgtccgcggggcaagccgtgagcatagcaggtcaggccgcacaagctctgcaaagggtggtggaaattctagatcggctggaggcggtgatggaggttgtggctgctgtgaaggaccttgtggattcattggaacaggtaggtcagattgtggaggcaccggtgatgccggacatgccctcggaggcggactggtccatttttgtgaatgagatcgaggctgtcgcagaggggatgccgacagaagtctcggaggttccggcgtggaaggccaagtgcaagaatgtggctgcactgggtagggagatgagcatcacggcagtacagatttctgagctccagtatgacatctgggtgcacggcttgatgcgggacatggctcgaagccaggcagacaggctggcggcaattcaacccgcagaccttaccaactatttggagatggcaacacagatggatatgcggactacaaggatgctactagggctgctcaacatgctgcacatccagaatgcggcactcatgtacgagtaccttctgacgcccacagagctcacagcatggccgctgggcatggatatcgtggccaacttgctcatcgcgcaggagaatgctgcactgttaggattagttcagctagggcccccatcggatttcacgagcaagcatgtggtgaaaggcatacctgtgagcttgctgctcgacggtgaggattgggagttcgagatccctgtggaaggtggcatgtccagcttcccttctagctggactcgcgtacggattcggcacctggagatgcactttgtgcaggagatgagcggtggcagcgagattatccaccagcctgccacccagacggggactgtttacatcctcctgcagggctccactaccttccatgaccgcagaagggacgaggtgatgacctttcaggcagcggctccgctcaactaccattacgcgtaccgccttgacactggcgaagccactcttacgaacgagccctcggaacagtttgccaacacattcatgcagatgacacccttcacgcgctggaggcttcgtctctctgcgtctgccgcagagaatgcaggattaggctttcccacagctacagctcccgactccacgaccgagatagtcatcacgttccatgttacggccattagacaaattgactggcggcacgaggaggaggaggag

SEQ ID NO: 748 - DNA, 2712 bp, Phyllitis scolopendium 'Angustifolia'
atgggtgtcacagtcgttagcgacgagctgtgtctgctggacttggacgaagggagcgaggaatgggtgaaggatgaggaggcgataaaggcagcgaggagtagtacacctgaggtgaactacgaggccctgtatgcgaatgcaaaccagatagcgcgcgacctgcgagtggggagtgtgccatgtggagagctcctttctgtcaacggccggatgtttgtgcggctggacagcctggatgtgagccggctgcggcaacccgagcgagtgcagaacctcattgtgctggcagacgttgtggagatttctggcagggatctggtgctcccgggcgcctcctccgtgcgcatcatctgccggatcctccatctcagaagccgagacgtgcagctggaccttccttacgcgtggcgcacttcttcacaaacccagccctttcaattctccctccgtgcgcagcaaattgtcgtgtcgccctctgctgcgcctcccagcctttcctctactggtgccttagtggttcggctgcaccgcgagttaaatcaatgggctaccacaagaaccaggttcactcaatatgtcgtccgatgctttggctacacggcaagtagtgtaaactctaccgtcaatatcaacatccctgtctcagcagagacgccaccatcctttcactggctccgtgtgaactccgagaatctgaacctcaaggtcaaccaggatgctgtgtggcgtgcccatgtcgacgtccaggttgcgttgccgtcacagctggatctcaatgacctgcatgtcatgatgggtatggagtctaccctgctgactgcagagatgattcttagctatcgatcagatcgcccggacgttgttgctctggcagtagagcatgttgaatggatcagaatgagcttggtgcagaatcatgagcaacaacctaatcttcctgacaaccaatttgcactacttgctcgagcggaaatgcttgcaaaattgtcgatagatggaagccaaagcctggttgtcccgcagcttgagtacaccgcgtacagcgaagtgatcagacaaatcgctgttgtggccgaagcatacaatcaggaattcacacagctgcatctctttgtacaacaaactacgatacttggtgactatgttctcaatacagtgaaagctcttgctgagaaggagaaagacatcgccctcctggaggaggctgttgtgcgtggcaagcagtccgagctcgacattgccgtcgagaaaatagagaggttagagcaacaaatcctgaagcaaattgaagaggtgcaagaagccaaggaagacatggagaaaggtatcatcgcatacaggaatcggctgatcgcaaatgccttctttgaagtcctcagtgctgtcctacaaattgcagggtcatttgtgtattttaagacaggccaaattactgatgggctagcagcattgggaggaggtctcgcatccgcaaatcaggcaatctggctgatagtggatgcagtagacgcaaaaaattcactaagcaacatcaccgacaacctggtcgatgtggaaaaggcaatgaaagtggtgaacgctgtgctcgcattggtggataccgtcacaaacctggatgagctcttggatgctccacggatgcctgacgttgactcctcacattgggacatcatggagaacgagatcgagatagtggcagcgcaactgcccaccgaggtcagcgaggtccgggtgtggagcctcaaatgcaggaacgtggtgatcgtgtgccgtgaggtttgcacaactgctgctgccataatgcagctgcaatacgagctctttgtgcatgcaaggaagaaagagatttctgaaaggcatgcggagcgcttggcgcagatccaagcggtagacctgggggactacttggagctggcaagccaggctgacatgcgcacggtgcgactgctcatacagctactggacctgctggctacccagaacggagctctgcaatatcactacctactgccaccggagccattcgttggctggcctaccatagacaatgtgaggagaatgctggtggcacggcagcaacaagctgtcatttcacaaaccagcctaggtccgtcctaccgtgtcaggacacgcttggtgctcgattctgtccccgtgggcttgctactctctggtgaggactatagcttcacaatcgcgccgatcagcgagcaaagcatcccggtcttccccgctgtctggtcgcgtgtgcgcatcgaagagttgcaaatggtgttcactgccggtactacaggggcgcacatgccagtggctggtcccggcggcaaggtctacttactattacagccatcgtctacgttccacgatcggctgcgctaccaggccttcaactaccaggcggctgctccacggccgttccagtatgtatatgaccttgcgaccggcgagccatcgctggtgagcaggcccagtgagccaggcctctttctgcgcatgacaccgttcacacgctggaggcttcggctttcggcctccgcgtaccagaacgaagggatctccttccccaccgccactgcagccgacagcgtggccgaaatcaccatcaccttcgagcttacggctattgtccatccacaatcttttctcgaggaggatggcatcacgttcctcatgccgggcaagggtggcgatgatcaggtcgtcagctaa

SEQ ID NO: 749 - DNA, 2712 bp, Phyllitis scolopendium 'Angustifolia'
atgggtgtcacagtcgttagcgacgagctgtgtctgctggacttggacgaagggagcgaggaatgggtgaaggatgaggaggcgataaaggcagcgaggagtagtacacctgaggtgaactacgaggccctgtatgcgaatgcaaaccagatagcgcgcgacctgcgagtggggagtgtgccatgtggagagctcctttctgtcaacggccggatgtttgtgcggctggacagcctggatgtgagccggctgcggcaacccgagcgagtgcagaacctcattgtgctggcagacgttgtggagatttctggcagggatctggtgctcccgggcgcctcctccgtgcgcatcatctgccggatcctccatctcagaagccgagacgtgcagctggaccttccttacgcgtggcgcacttcttcacaaacccagccctttcaattctccctccgtgcgcagcaaattgtcgtgtcgccctctgctgcgcctcccagcctttcctctactggtgccttagtggttcggctgcaccgcgagttaaatcaatgggctaccacaagaaccaggttcactcaatatgtcgtccgatgctttggctacacggcaagtagtgtaaactctaccgtcaatatcaacatccctgtctcagcagagacgccaccatcctttcactggctccgtgtgaactccgagaatctgaacctcaaggtcaaccaggatgctgtgtggcgtgcccatgtcgacgtccaggttgcgttgccgtcacagctggatctcaatgacctgcatgtcatgatgggtatggagtctaccctgctgactgcagagatgattcttagctatcgatcagatcgcccggacgttgttgctctggcagtagagcatgttgaatggatcagaatgagcttggtgcagaatcatgagcaacaacctaatcttcctgacaaccaatttgcactacttgctcgagcggaaatgcttgcaaaattgtcgatagatggaagccaaagcctggttgtcccgcagcttgagtacaccgcgtacagcgaagtgatcagacaaatcgctgttgtggccgaagcatacaatcaggaattcacacagctgcatctctttgtacaacaaactacgatacttggtgactatgttctcaatacagtgaaagctcttgctgagaaggagaaagacatcgccctcctggaggaggctgttgtgcgtggcaagcagtccgagctcgacattgccgtcgagaaaatagagaggttagagcaacaaatcctgaagcaaattgaagaggtgcaagaagccaaggaagacatggagaaaggtatcatcgcatacaggaatcggctgatcgcaaatgccttctttgaagtcctcagtgctgtcctacaaattgcagggtcatttgtgtattttaagacaggccaaattactgatgggctagcagcattgggaggaggtctcgcatccgcaaatcaggcaatctggctgatagtggatgcagtagacgcaaaaaattcactaagcaacatcaccgacaacctggtcgatgtggaaaaggcaatgaaagtggtgaacgctgtgctcgcattggtggataccgtcacaaacctggatgagctcttggatgctccacggatgcctgacgttgactcctcacattgggacatcatggagaacgagatcgagatagtggcagcgcaactgcccaccgaggtcagcgaggtccgggtgtggagcctcaaatgcaggaacgtggtgatcgtgtgccgtgaggtttgcacaactgctgctgccataatgcagctgcaatacgagctctttgtgcatgcaaggaagaaagagatttctgaaaggcatgcggagcgcttggcgcagatccaagcggtagacctgggggactacttggagctggcaagccaggctgacatgcgcacggtgcgactgctcatacagctactggacctgctggctacccagaacggagctctgcaatatcactacctactgccaccggagccattcgttggctggcctaccatagacaatgtgaggagaatgctggtggcacggcagcaacaagctgtcatttcacaaaccagcctaggtccgtcctaccgtgtcaggacacgcttggtgctcgattctgtccccgtgggcttgctactctctggtgaggactatagcttcacaatcgcgccgatcagcgagcaaagcatcccggtcttccccgctgtctggtcgcgtgtgcgcatcgaagagttgcaaatggtgttcactgccggtactacaggggcgcacatgccagtggctggtcccggcggcaaggtctacttactattacagccatcgtctacgttccacgatcggctgcgctaccaggtcttcaactaccaggcggctgctccacggccgttccagtatgtatatgaccttgcgaccggcgagccatcgctggtgagcaggcccagtgagccaggcctctttctgcgcatgacaccgttcacacgctggaggcttcggctttcggcctccgcgtaccagaacgaagggatctccttccccaccgccactgcagccgacagcgtggccgaaatcaccatcaccttcgagcttacggctattgtccatccacaatcttttctcgaggaggatggcatcacgttcctcatgccgggcaagggtggcgatgatcaggtcgtcagctaa

SEQ ID NO: 750 - DNA, 2628 bp, Phyllitis scolopendium 'Angustifolia'
atggagtatggcagcttgtatggtgatgtgaaccaggtgagcctgaggttcgagaatacggaggtctctgaggtgatggtggtgcatcggatgcatgtgcggctggaggagctggacatgagcaacgacaagctcaaacgcctgtacgtgctggcggacgtggtggagctgccttcccagcgtaaaactatcgttatccccgccaccgtttcggcgataatcatgtgccgtgttctctacatcccttacatctggaccgtgtttgacaactgcaccgtcctcctcccgcacatgcgcttccgggtcgtcgaaacaagcctcacgctcagaactggccaattctttgccttaccctcctctgacaccgtcgacaacggcgccggcagctttggcggcctctacatccatgccgaccgcttcatctaccgccaggccacatcgtttacctccgactgggtccagcctctgcaacttcgggtacgaggcagctccaccttctcctcaaccttccgtgatcctgactggccagaaaccctacctgtcaccaacctcaatcaaaccatcaccctctccttgggctcattcctcacaccctccgactctgacttgcagagatctgacgagattgagttcctgcagacggagccccagagagtgcaagtggtatttaaccgacccggcggcacgaccggcgtggctttactcgtcgagaactcccctgaaatcagctttttccctgcaccatcgctggaacatgtccctgcagacgtcctcgccgatccttccatcatcttgggcatgcaaatgaacatgctcagtgccgagcttgtccgggctgctcacaattcgcagcaagtcatcaaagctgtcactaagcatgtggaatggctcagcaagatcttgcttcaggttgcttcaccgagtgatgacattctagcgctcttgtttcgcgtgcaagcattcattaagatggcaaagcaatcgcgctttgtggttccacggttacaataccacgtgtacagtaaccttatcaatcggatggtgcaagtagcccaggattatgaccaggagttcaggcaactcagacttttcattgcacaaaatgagatattgggaagctatttgctacagcaaaataaggctttcgcagataaggagaaggacatgagtgctttccactcgcaagttgtgtctatgaggagatccgagctgacctctaccatagaaatgatgggcaggctgagcttgcaaatggaaacggagggtgaggcgatggacgaagccagggacagtatggtcgaagcaattcaagaatatgaaaggaaacaacttgcaagggctctatttgcagtgcttggggcaatagcaagtgttgctcttgcatttgccactggaggtgcaactgcaccagcggcagtggcagcagctggagcggcagtcactgcagcaggtagattggcagaaggcctccgaagggttgtggagatcctcgaaggcttgcaagcgatcatggaggttgtggcagctataagagatctcgtagaatcactggaaaacatgggtcaactagtaggagctccggaaatgccagagatgcctacaaatgcagactggttaatttttgtaaatgaggtggaggcagtggcagagcaagtgccagaagaagtgtcagaggtcccagtgtggaaggccaagtgcaagaatgtggcggtgctagggcaagagatgtgcacaacagcagcacatattagcgagctacagtatcagataagggtggaagagatgctacaggagattgcacaacgtcaagcagacaggctaatggggatatcagcagcagatctatcaagctacacggagatggcaacacagatagacatgcgtacaactcggatgctccttcagctcatcaagatgttgtacattcagaatgctgcaatcaagtacgagtacttgtacgctgcgagtgagcggcttaactcatggccagtgaccatgcagacagtatggaccatgctcttgcaacaagagaatgcagctatcttgggcttgctagacttggggccctctaatgatttcacagtaacacatgttgttaaagacataccggtcaagttgttagttgatggttacgattggcattttgagatccctgtggaggattccgcaatcttcccggcaggatggtctcgtgttcggatacgctatgtcgagcttaaatttggcaaacagggtactgacagtaacattgtcatccaccagcctagcactaatactggcctaatctacgtgctcttacaaagctctcgtttcctcagtgatcgcaaacgggaggaggtgatggactatgaggcaagcacgggacttgcatatgcgtacgcctatgacctcagcacgggtgcaaccactctaactaacatcccctcagaggcacatgccaacacatttatgcaaatggcacccttcactgcctggaggcttcgtctctctgcctctgctatggaaaatcagggactggtgtttcctacagccacttctccggacaatactacccaaatctccatcacattctatgtcactgctattcgacggatagatactcgtcgacaacgagctgatgcggagtta

SEQ ID NO: 751 - DNA, 2652 bp, Phyllitis scolopendium 'Angustifolia'
atggagtactccgacttgtatgaggatgtgaaccaggtaagcttacgcttccagcagactgagttctccgaggtcatggtggtccatcgcatgtacttccgccttcttgacctcgacatgagcaccggaccctctttccttatgtttcccggcagcgagaaggtgcgccgcctctacatcgttgccgacattgtcgagcttcccgccaatggcatcaacatgcggcttcccgccaccgtatccgtcgtcatcctctgccgggttctctatgttcaggatgtcaactcgccctttctcacatgcggcctccatttccccttgatgcgcatgcgtgtggtggagacccaagagggcacggtccgtgtctttccggtccccgatagttcctcctcctccggaggtagtaccgacattggcctcttcatccacgccgatcgcttcatctaccggcaggacacctctacccttgaccctcttcagcccctgcaattgagagtgatcggaggttctacattctccacagtccgccctggttggccagaaactcttgaggtattctccctcattttgtggctcactctgtccaaggggcagcccattcctgccacagaatctgatttgcagagatctgacgaggttgagcttctgcccccaccttcccccgaccgactcctcgtagtctttaccggcctcgcacctggaaacatcggcagtatgtctgtggatgttgagtatatcggtgctggatttagctacttcagtatacccccggtggaccctgtccccacggaagttctctccgacccatacatcatcctgggcctacaaatgaacatgctcattgcagagcttgtcctggctgctcacaattctccgcgggtcatcaatgttgtcacgaagcatgtggaatggcttaacaagatattgcggcccaagcttgatttaccgaacgatgatattttaggacttctgtttcgtgtccaaaccttcttgaagatggctaagcagcctcgatctgtagtaccacggttgcaataccacatgtacagtagcctcatcaatcgcatggtgcaagtagcccaggtttacgatcaagatttcaagcaactcaaactcttcattgcgcaaaatcagatccttggcagctacttgttagaacaaaataaggcatttgcaagtaaagagaaggacatgagctctttccactctcaagtcgtgtcgctgcggagaaccgagctcaacaacgcaatagataagatggaccaattgagtgtgcaaatggaaaacgagaatcaagcaatggaccaggccaaagaggacatgatgcaagccattgaagaatatgagaagaagcaactcgccaacgctctttttgctgtgcttggagcgatagcgagtgttgcccttgcctttgcgacagctggtgcaaccgcacctgcggctgtggcggctgcgggggcagctgtgagtgcagcaggcagattggccgaaggtttgaaaaaagttgttgaaatattggaagggctggcagcagtgatggagattgttgcagtcataagggagcttgtagagtcactgcagaaccttggaagtctgattgacacaccggacatgccagacatgccatcggatgcagactggttgatctttgtgaatgaggtggaggctgttgcagagcaaatgccagcagatgtggttggttcggtggctgtgtggaaggcgaagtgcaagaacgtggctgtgcttgggcaggagatgtgcaccacagcggcacacatcggagagttaacataccagataaaggtggaagaaatgctacaagagattgcacaaaaacaagcaaacaggttggagggaataacacctgcagacttatcaagctacacagaaatgctttcacagatagacatgcgcaccactcgacagctgcttcagctcatccgggtgttgaacatccaaaatgcagcaatcaagtacgagtacttgtatgttgcaagcaggcagttggattcatggccggtgagtatggatactgtttggagcatgctcttgcagcaagagacctcagctatcacaggcttgttagacctgggaccctctaccgatttcacacgcacctttgtcgtcaaaaacattccggtgggactcttagttgatggtagagattggcagttcgtcatccccgtggaggattctccgacctttcccatcgggtactctcgtgttcgcatacgttatgtcgagctgaaattcgagcaagacagtaatgatggcagtgtcatccaccagcctcgcacaaacagcggcttgatatacatgctcttacaaaactctcaattgtttagtgatcggaggcggagggagatactggactatgaggcaagcatgggacttgcatatgcatttgcatacaatcttaccacgggagtgcctactctcaccaacatcccctccgatgagcatgccaacactttcatgcgaatgacgcccttcaataattggcgacttcgactctcttcctctgctgaggaaaatcggggattggcatttcccacggccaattctctagatgatatcacccaagtttccatcacattctacattactgctattcgtggaatagatacccgccgggaagtcgatgaggagtga

SEQ ID NO: 752 - DNA, 2640 bp, Phyllitis scolopendium 'Angustifolia'
atggagtatggcagcttgtatggtgatgtgaaccaggtgagcctgaggttcgagaagacggaggtctctgaggtgatggtggtgcatcggatgcatgtgcggctggaggagctggacatgagcagcgacaagctcaaacgcctgttcgtgctggcggacgtggtggagctgccttcccagcgtaaaactatcgttatccccgccaccgtttcggtgataatcatgtgccgcattctctacatcccttacatctggaccgtgctcgacaactgcaccgtcctcctcccgcacatgcgcttccgggtcgtcgaaacaagcatcgcgcccagagctggccaattctttgccttaccctcctctgactccgtcgacaacggcgccggcagcgttggcggcctctacatccatgccgaccgcttcatctaccgccagggcacatcgtttacctccgactggagccactccgactgggtccagcctctgcaactccgggtacaaggcagctccaccttctcctcaaccttccgtgatcctaactggccagaaaccctacctgtcaccaacctcaatcaaaccctcagcctctccttgggctcattcctcacaccctccgactctgacttgcagagatctgacgagattgagttcctggcgacggagccccagagagtgcaagtgatatttaaccgacccggcggctcgaccggcgtgcttttattcgtcgagaactcccctgaaatcagctttttccctgcaccatcgctgcaacatgtccctgcagacgtcctcgccgatccttccatcatcttgggcatgcaaatgaacatgctcagtgccgagcttgtcctggctgctcacaattcgcagcaagtcatcaaagctgtcactaagcatgtggaatggctcagcaagatcttgcttcaggttgcttcaccgagtgatgacattctagcgctcttgtttcgcgtgcaagcattcattaagatggcaaagcaatcgcgctttgtggttccacggttacaataccacgcgtacattaaccttatcaatcggatggtgcaagtagcccaggattatgaccaggagttcaggcaactcaggcttttcattgcacaaaatgagatattgggaagctatttgctacagcaaaataaggctttcgcagataaggagaaggacatgagtgctttccactcgcaagttgtgtctatgaggagatccgagctgacctctaccatagaaatgatgggcaggctgagcttgcaaatggaaacggagggtgaggcgatggacgaagccaaggacagtatggtcgaagcaattcaagaatatgaaaggaaacaacttgcaagggctctatttgcagtgcttggggcaatagcagctgttgctcttgcatttgccactggaggtgcaactgcaccagcggcagtggcagcagctggagcggcagtctctgcagcaggtagattggcagaaggcctccgaagggtcgtggagatcctccaaggcttgcaagagatcatggaggttgtggcagctataagagatctcgtagaatcactggaaaacatgggtcaacttgtagcagctcctgaaatgccagagatgcctacaaatgcagactggttaatttttgtaaatgaggtggaggcagtggcagagcaagtgccagaagaagtgtcagaggtcccagtgtggaaggccaagtgcaagaatgtggcggtgctagggcaagagatgtgcacaacagcagcacatattagcgagctacagtatcagataagggtggaagagatgctacaggagattgcagaacgtcaagcagacaggctaatggcgatatcagcagcagatctttcaagctacacggagatggcaacacagatagacatgcgtacaacgcggatgctccttcagctcatcaagatgttgtacattcagaatgctgcaatcaagtacgggtacttgtaccctgcgagtgagcggcttaactcatggccagtgaccatgcagacagtatggaccatgctcttgcaacaagagaatgcggctatcttgggcttgctagacttggggccctctaatgatttcacagtaacacatgttgttaaagacataccggtcaagttgttagttgatggttacgattggcattttgagatccctgtggaggattccgcaatcttcccggcaggatggtctcgtgttcggatacgctatgtcgagcttaaatttggcaaacagggtactgacagtaacattgtcatccaccagcctagcactaatactggcctaatctacgtgctcttacaaagctctcgtttcctcagtgatcgcaaacgggaggaggtgatggactacgaggcaagcacgggacttgcatatgcgtacgcctataacctcagcacgggtgcaaccactctaactaacatcccctcagaggcaaatgccaacacatttatgcaaatggcacccttcactgcctggaggcttcgtctctctgcctctgctatggaaaatcagggactggtgtttcctacagccacttctccggacaatactacccaaatctccatcacattctatgtcactgctattcgagggatagatcgtcgacaaggagctgatgcggagtta

SEQ ID NO: 753 - DNA, 2640 bp, Phyllitis scolopendium 'Angustifolia'
atggagtatggcagcttgtatggtgatgtgaaccaggtgagcctgaggttcgagaagacggaggtctctgaggtgatggtggtgcatcggatgcatgtgcggctggaggagctggacatgagcagcgacaagctcaaacgcctgttcgtgctggcggacgtggtggagctgccttcccagcgtaaaactatcgttatccccgccaccgtttcggtgataatcatgtgccgcattctctacatcccttacatctggaccgtgctcgacaactgcaccgtcctcctcccgcacatgcgcttccgggtcgtcgaaacaagcatcgcgcccagagctggccaattctttgccttaccctcctctgactccgtcgacaacggcgccggcagcgttggcggcctctacatccatgccgaccgcttcatctaccgccagggcacatcgtttacctccgactggagccactccgactgggtccagcctctgcaactccgggtacaaggcagctccaccttctcctcaaccttccgtgatcctaactggccagaaaccctacctgtcaccaacctcaatcaaaccctcagcctctccttgggctcattcctcacaccctccgactctgacttgcagagatctgacgagattgagttcctggcgacggagccccagagagtgcaagtgatatttaaccgacccggcggctcgaccggcgtgcttttattcgtcgagaactcccctgaaatcagctttttccctgcaccatcgctgcaacatgtccctgcagacgtcctcgccgatccttccatcatcttgggcatgcaaatgaacatgctcagtgccgagcttgtcctggctgctcacaattcgcagcaagtcatcaaagctgtcactaagcatgtggaatggctcagcaagatcttgcttcaggttgcttcaccgagtgatgacattctagcgctcttgtttcgcgtgcaagcattcattaagatggcaaagcaatcgcgctttgtggttccacggttacaataccacgcgtacagtaaccttatcaatcggatggtgcaagtagcccaggattatgaccaggagttcaggcaactcagacttttcattgcacaaaatgagatattgggaagctatttgctacagcaaaataaggctttcgcagataaggagaaggacatgagtgctttccactcgcaagttgtgtctatgaggagatccgagctgacctctaccatagaaatgatgggcaggctgagcttgcaaatggaaacggagggtgaggcgatggacgaagccaaggacagtatggtcgaagcaattcaagaatatgaaaggaaacaacttgcaagggctctatttgcagtgcttggggcaatagcagctgttgctcttgcatttgccactggaggtgcaactgcaccagcggcagtggcagcagctggagcggcagtctctgcagcaggtagattggcagaaggcctccgaagggtcgtggagatcctccaaggcttgcaagagatcatggaggttgtggcagctataagagatctcgtagaatcactggaaaacatgggtcaacttgtagcagctcctgaaatgccagagatgcctacaaatgcagactggttaatttttgtaaatgaggtggaggcagtggcagagcaagtgccagaagaagtgtcagaggtcccagtgtggaaggccaagtgcaagaatgtggcggtgctagggcaagagatgtgcacaacagcagcacatattagcgagctacagtatcagataagggtggaagagatgctacaggagattgcagaacgtcaagcagacaggctaatggcgatatcagcagcagatctttcaagctacacggagatggcaacacagatagacatgcgtacaacgcggatgctccttcagctcatcaagatgttgtacattcagaatgctgcaatcaagtacgggtacttgtaccctgcgagtgagcggcttaactcatggccagtgaccatgcagacagtatggaccatgctcttgcaacaagagaatgcggctatcttgggcttgctagacttggggccctctaatgatttcacagtaacacatgttgttaaagacataccggtcaagttgttagttgatggttacgattggcattttgagatccctgtggaggattccgcaatcttcccggcaggatggtctcgtgttcggatacgctatgtcgagcttaaatttggcaaacagggtactgacagtaacattgtcatccaccagcctagcactaatactggcctaatctacgtgctcttacaaagctctcgtttcctcagtgatcgcaaacgggaggaggtgatggactacgaggcaagcacgggacttgcatatgcgtacgcctataacctcagcacgggtgcaaccactctaactaacatcccctcagaggcaaatgccaacacatttatgcaaatggcacccttcactgcctggaggcttcgtctctctgcctctgctatggaaaatcagggactggtgtttcctacagccacttctccggacaatactacccaaatctccatcacattctatgtcactgctattcgagggatagatcgtcgacaaggagctgatgcggagtta

SEQ ID NO: 754 - protein, 846 aa, Polystichium tsus-simense
MDYSTLYRDLNQVRVPVDRAEFSEVMVIHRMYVRLSDLDVGELVGAERVKRLYVFADVVELVPQTVWFRQIQMPGSVTVIILCRLLQFPTVGSQAETLQLPFMRLQAIVKEQNRSEITAADGMKWGTYIHGNEVQLRSNNSRFDVWAPRSIITSAIHNVLNEPGRLASNTVIARAQGAVTTTRMSAWLSHQGFVLPTVSPTAFSVLPLQSTNVSFTSIPVEVVTDPNILLGMQTTLHIAELVKVCHPSPDIVSAVAEHAIWLSKVLLQVVQNESQLQGTESYNECLALLGRVQSVIKMGRFGSVVPQLQYRMYGSLINQMAQVAQNYDREFKQFKLFIIQNQILGSYLLQQNKAFADRELQMESFHSAVISHRAQELDTAIAKMDRLSLQMEEENRAMEQAEKEMNEGLRRFQNEQVARAIFSVLRAVAMIGLAFVTGGATAPAAVASAGQAVSIAGQAAQALRRVVEILEGLAAVMEVVAAVKELVASLEQVGQIVDAPEMPDMPSEADWSIFVNEIEAVAEGMPTEVSEVPTWKAKCKNVAALGREMSITAVQISELQYHIWVQGLMRDIARSQADRLAAIQPVDLTNYLEMATQMDMRTTRMLIGLLNMLRIQNAALMYEYLLTPMELTAWPLEMDTMANLLIEQENSALLGLIQLGPSSDFTSRHVVKGIPVSLLLDGEDWEFEIPVQRGMSSFPFSWTRVRIRHLEMHFVQEASSGGEIIHQPATQTGTVYILLQGSTIFHDRRRDEVMTFQAADPLNYQYAYRLDTGEATLTNEPSEQFANTFMQMTPFTRWRLRLSASAKENAGLAFPTATAPDSTTEIVITFHVTAIRQIDWRQEVEE

SEQ ID NO: 755 - protein, 846 aa, Polystichium tsus-simense
MDYSTLYRDLNQVRVPVDRAEFSEVMVIHRMYVRLSDLDVGELVGAERVKRLYVFADVVELVPQTVWFRQIQMPGSVTVIILCRLLQFPTVGSQAETLQLPFMRLQAIVKEQNRSEITAADGMKWGTYIHGNEVQLRSNNSRFDVWAPRSIITSAVHNVLNEPGRLASNTVIARAQGAVTTTRMSAWLSHQGFVLPTVSPTAFSVLPLQSTNVSFTSIPVEVVTDPNILLGMQTTLHIAELVKVCHPSPDIVSAVAEHAIWLSKVLLQVVQNESQLQGTESYNECLALLGRVQSVIKMGRFGSVVPQLQYRMYGSLINQMAQVAQNYDREFKQFKLFIIQNQILGSYLLQQNKAFADRELQMESFHSAVISHRAQELDTAIAKMDRLSLQMEEENRAMEQAEKEMNEGLRRFQNEQVARAIFSVLRAVAMIGLAFVTGGATAPAAVASAGQAVSIAGQAAQALRRVVEILEGLAAVMEVVAAVKELVASLEQVGQIVDAPEMPDMPSEADWSIFVNEIEAVAEGMPTEVSEVPTWKAKCKNVAALGREMSITAVQISELQYHIWVQGLMRDIARSQADRLAAIQPVDLTNYLEMATQMDMRTTRMLIGLLNMLRIQNAALMYEYLLTPMELTAWPLEMDTMANLLIEQENSALLGLIQLGPSSDFTSRHVVKGIPVSLLLDGEDWEFEIPVQRGMSSFPFSWTRVRIRHLEMHFVQEASSGGEIIHQPATQTGTVYILLQGSTIFHDRRRDEVMTFQAADPLNYQYAYRLDTGEATLTNEPSEQFANTFMQMTPFTRWRLRLSASAKENAGLAFPTATAPDSTTEIVITFHVTAIRQIDWRQEVEE

SEQ ID NO: 756 - protein, 891 aa, Polystichium tsus-simense
MTMAAITAPRKYSELYKDLNQISERIRLDQMEFSEVMVIHRMFIKLEELDLGYLEGAERVKRLYVFADVVEVEEGGNFIEVGPLARLPGSIVVVILCRVLKVGVVMNNYLNNAMRVQLPHMKLRLVEVTTQPTGTKLHIHRADAEDYQYPALCIHASVIQSSIRLASTNRPPTYPIPLRFFTFMPDRGSGDVVFSSESRSLIDEPVNIFYVYSHMPEFRRSLPVPEAATLDPASLSDDWYYVHLSRVNSVMSSYVAAEGELEPAFSLLKPKIPFAVLTDPNILLAMQTSLLIAELVELAHPSADTADAVAKHVEWLSKILLQAVSTDEEGMLNPSHDEHLALLFRAQYLMKMMPGRTRSLVVPQLQYDVYSNLINRMAQVAESYDQSLRQFKLFIEQNKILGSYLLQQNKAFADRERDMDVFHSELISQRKIELDNTLLKMDQLSLQMETQREDMDQAKNDMDAGLREFQNRQVAAAMFAVIGAIAAIGLAFVTGGATAPAAMVAAKTAVTAAGAAARALERVIEILDSLQAVMEMVSLIKELVSSLEEIGQLVEAPEMPEMPTEADWFIFENEIEGVAEQMPTEVSEVSAWKTKCKNVAVLGREMITTASYISELQYDIKVQGMLQEIARSHANRLSSIQATDLSNYTEMVTQMDMRTTRMLVALIKVVHMQNAALMYQCLSPPTYVNAWPVTMETVWTMLVQHEHAAVLGLMRLGPSFDFMRTYVVEGIPVQLLLDGEDWEFDIPVEDYTTFPSTWSRVRIHHLEMKFVQAADVHQPITDTGTVYMLLQGSRIFRDRNRADAIHYEAAMSLDYHYAYRLDTGETTLSNLPSQDFTRTFMRMTPFTNWRLRLSASAEENKGLRFPTATSAGSTTQIAVIFYISAIRKISF

SEQ ID NO: 757 - protein, 893 aa, Polystichium tsus-simense
MTMAATAPREYSELYKDLNQISERIRLDQMEFSEVMVIHRMFIKLEELDLGHLEGAERVKRLCVFADVVEVEEGGNFIDVGPVARLPGSIMVVILCRVLKVGVVMSDFYVNNAMRLQLPHMKLRLVEVTTQPTGTKLHIHRADAEDYQYPALCIHASVIQSSIRLRSSSNNRPPTFPIPLRFFNFRPDRGSNDVVFSSESRSLIDEPVNIFYVYSHMPAFLHALPIPEAATIDPASLSSDWYYVHLSRVNSVLSSSVAAEGELEPAFSLLKPKIPFAVLTDPNILLAMQTSLLIAELVELAHPSADTADAVAKHVEWLSKILLQAVSTDEEGMLNPSHDEHLALLFRAQYLMKMMPGRTRSLVVPQLQYDVYSNLINRMAQVAESYDQSLRQFKLFIEQNKILGSYLLQQNKAFADRERDMDVFHSELISQRKIELDNTLLKMDQLSLQMETQREDMDQAKNDMDAGLREFQNRQVAAAMFAVIGAIAAIGLAFVTGGATAPAAMVAAKTAVTAAGAAARALERVIEILDSLQAVMEMVSLIKELVSSLEEIGQLVDAPEMPEMPTEADWFIFENEIEGVAEQMPTEVSEVSAWKTKCKNVAVLGREMITTASYISELQYDIKVQAMLQEIARSHANRLSSIQATDLSNYTEMVTQMDMRTTRMLVALIKVVHMQNAALMYQCLSPPTYVNAWPVTMETVWTMLVQHEHAAVLGLMRLGPSFDFMRTYVVEGIPVQLLLDGEDWEFDIPVEDYTTFPSTWSRVRIHHLEMKFVQAADVHQPITDTGTVYMLLQGSRIFRDRNRADAIHYEAAMSLDYHYAYRLDTGETTLSNLPSQDFTRTFMRMTPFTNWRLRLSASAEENKGLRFPTATSAGSTTQIAVIFYISAIRKISF

SEQ ID NO: 758 - protein, 851 aa, Rumohra adiantiformis
MDYSTLYTDLNQISMPLDRVEFSEVMVIHRMYLRLSDLNVGELPGAERVKRLYVFADVVELATFAYPQFLHTRMPGSVTVIILCRLLQFPTDGSFPAWLELPFMELHTLIEQHRSEIKAADDANWGTYVHAEEVQLSPLFNGWPYLVVEAQRCIITAAMHNTFNRTGWVRSVTQFINDQSGRVETTLLARTEFGHIYLPLETDSPTAFSVSHRQITNLPVEYTGIPVEVVTDPNILMGMQTSVHIAELVKACYPSPELVSAVGVHVNWLNEVLLRVVQNESQLQGTEAYNECLALLGRIQCVMKMGPFVSVVPQLQYRMYGSLIRQMAQVAQNYDQDFRQLKLFIAQNQILGSYLLQQNKAFADREVQMESFHSAVISQRRQELDDAIAKMDRLSLQMEEEDRAMEQARKEMEEGLKQFQNEQVARAVFAVLKSVAMIALAFVTAGATAPGAAASAAQAVSIAVQAAQGLQRVVEILEGLEAVMEVVAAIKDLVGALDQVSQIVDAPPMPDMPSEADWSIFVNEIEAVAEGMPTEVSEVPAWKAKCKNVAALGREMCITAEQISQLQYDIWVQGLLREIAQSHADRLAAIQPANLTNYLEMAIQMDMRTTRILIGLLNIMRIQNAALMYEYLLTPTQLTAWPLRMDTVANLLITQESAALSGLAQLGPPSDFTSRHVVKAIPVSLLLDGKDWEFEIPVQGGMSSFPSSWTRVRIRHLEMHFVQEASGGGEIIHQPATQTGTVYILLQGSTVFHDRRREEVMTFQAAVPLNYHYAYRLDTGEATLTNEPSEQFANTFMQMTPFTHWRLRLSASAAENEGLAFPTATAPDSTTEIAITFHVTAIRQIDWRQEE

SEQ ID NO: 759 - protein, 851 aa, Rumohra adiantiformis
MDYSTLYTDLNQISMPLDRVEFSEVMVIHRMYLRLSDLNVGELPGAERVKRLYVFADVVELATFAYPQFLHTRMPGSVTVIILCRLLQFPTDGSFPAWLELPFMELHTLIEQHRSEIKAADDANWGTYVHAEEVQLSPLFNGWPYLVVEAQRCIITAAMHNTFNRTGWVRSVTQFINDQSGRVETTLLARTEFGHIYLPLETDSPTAFSVSHRQITNLPVEYTGIPVEVVTDPNILMGMQTSVHIAELVKACYPSPELVSAVGVHVNWLNEVLLRVVQNESQLQGTEAYNECLALLGRIQCVMKMGPFVSVVPQLQYRMYGSLIRQMAQVAQNYDQDFRQLKLFIAQNQILGSYLLQQNKAFADREVQMESFHSAVISQRRQELDDAIAKMDRLSLQMEEEDRAMEQARKEMEEGLKQFQNEQVARAVFAVLKSVAMIALAFVTAGATAPGAAASAAQAVSIAGQAAQGLQRVVEILEGLEAVMEVVAAIKDLVGALDQVSQIVDAPPMPDMPSEADWSIFVNEIEAVAEGMPTEVSEVPAWKAKCKNVAALGREMCITAEQISQLQYDIWVQGLLREIAQSHADRLAAIQPANLTNYLEMAIQMDMRTTRILIGLLNIMRIQNAALMYEYLLTPTQLTAWPLRMDTVANLLITQESAALSGLAQLGPPSDFTSRHVVKAIPVSLLLDGKDWEFEIPVQGGMSSFPSSWTRVRIRHLEMHFVQEASGGGEIIHQPATQTGTVYILLQGSTVFHDRRREEVMTFQAAVPLNYHYAYRLDTGEATLTNEPSEQFANTFMQMTPFTHWRLRLSASAAENEGLAFPTATAPDSTTEIAITFHVTAIRQIDWRQEE

SEQ ID NO: 760 - protein, 901 aa, Rumohra adiantiformis
MAASAAAIPDYKELYRDLNQISERMRLDQMDFSEVMVIHRMYIRLEELDLGHLEGADKVKRLYVLADVVEVEEGGNFIEQGPVARLPGSILVVILCRVLLVGIVINVHSNGENFNNAMRLQLPHLKLRAVEISSSTDSNFKLEMHRVDQTAGEYNQYPALTVNADLVQCRMRWVIHRPPITSVSLSPIFVAFMPDRGSGDVIFSSESRSMVDRPVQMFSVYSHVPRFIQSRPLPLPEEVTIDLSSWEPKEFYSLFVSTAPTVSLSKSEAVAGDLEPAFSILKRTVPVVVLTDPNILLAMQASLLIAELVQIAHPSPDTADAVAKHVEWLNKLLIQAASDTEGTPAHHEYLALLFRAQYVMKKIGRTRHLVVPQLQYDVYSGLINRMAQVAESYDQSLRQFKLFIQQNKILGSYLLQQNRAFADKERDMDVFYSELISQREVELQSTLLKMDQLSSQMETQREDMEQAQKEMEEGLRRFQNRAVANAMFAVIGAVAAIGLAFLTGGATAPGAMAAAGNAVTAAGQAARALQRVLDILEGLQVVMEVLSIIKELVASLQDLGQLVDAPEMPEMPLESDWYIFENSIEEVAEGMPEEVSEVTAWKTKCKNVAVLGREMITTAVYISQLMYDIKVQGMLQEIAKSHAQRLENIQAADLQGYTEMVTQMDMRTTRMLVELIKVVYMQNAALMYQSLSPPTAVNAWPVTMETVWSILLQHDHAALLGLLRLGPSFDFMRTYTVEDVPVSLLLDGEDWQFEIPVRDYTVFPSTWSRVRIHHLEMKFVKAAHVHQPITDTGSIYVLLQGSRIFRDRNEDETIDYEAALPLDYHYAYRLDTGETTLSNLPSQEFTKTFLRMTPFSNAWRLRLSSSAEENKGLAFPTATAADSTTQIAITFYVTAIRRISF

SEQ ID NO: 761 - protein, 901 aa, Rumohra adiantiformis
MAASAAAIPDYKELYRDLNQISERMRLDQMDFSEVMVIHRMYIRLEELDLGHLEGADKVKRLYVLADVVEVEEGGNFIEQGPVARLPGSILVVILCRVLLVGIVINVHSNGENFNNAMRLQLPHLKLRAVEISSSTDSNFKLEMHRVDQTAGEYNQYPALTVNADLVQCRMRWVIHRPPITSVSLSPRFVAFMPDRGSGDVIFSSESRSMVDRPVQMFSVYSHVPRFIQSRPLPLPEEVTIDLSSWEPKEFYSLFVSTAPTVSLSKSEAVAGDLEPAFSILKRTVPVVVLTDPNILLAMQASLLIAELVQIAHPSPDTADAVAKHVEWLNKLLIQAASDTEGTPAHHEYLALLFRAQYVMKKIGRTRHLVVPQLQYDVYSGLINRMAQVAESYDQSLRQFKLFIQQNKILGSYLLQQNRAFADKERDMDVFYSELISQREVELQSTLLKMDQLSSQMETQREDMEQAQKEMEEGLRRFQNRAVANAMFAVIGAVAAIGLAFLTGGATAPGAMAAAGNAVTAAGQAARALQRVLDILEGLQVVMEVLSIIKELVASLQDLGQLVDAPEMPEMPLESDWYIFENSIEEVAEGMPEEVSEVTAWKTKCKNVAVLGREMITTAVYISQLMYDIKVQGMLQEIAKSHAQRLENIQAADLQGYTEMVTQMDMRTTRMLVELIKVVYMQNAALMYQSLSPPTAVNAWPVTMETVWSILLQHDHAALLGLLRLGPSFDFMRTYTVEDVPVSLLLDGEDWQFEIPVRDYTVFPSTWSRVRIHHLEMKFVKAAHVHQPITDTGSIYVLLQGSRIFRDRNEDETIDYEAALPLDYHYAYRLDTGETTLSNLPSQEFTKTFLRMTPFSNAWRLRLSSSAEENKGLAFPTATAADSTTQIAITFYVTAIRRISF

SEQ ID NO: 762 - protein, 853 aa, Asplenium trichomanes
MDYSTLYRDLNQISMPVDHVEFSEVMVIHRMYVRLSDLDVGELAGAEKVKRLYLFADVVELAPELAPGKRTQMPGSITVIILCRLLQFPTDGSRAATLQLPFMKLHAILRERYRSEITAADGTNWGTYIHGDEVQVSPLYTNNSVLPVWADRSIITSAFHNVLDEPGRVISSTSITMAQAAPNNTRMTAEPGWVFGNRFLLYTVSSTAFSVLPLQSTNISFTSIPVEVVADPNILLGMQTTVHIAELVKACRPSPDIVSAVGQHVIWLNKVLLHVVQNESQLQGTESYNECLALLGRVQSVMKIGRSGSVVPQLQYRMYGSLIKQMAQAAQNYDQEFRQFKLFIIQNQILGSYLLQQNKAFADRELQMESFHSAVISQRMQELDTAIAKMDRLSLQMEEENKAMEQAQREMDEGLRRFRNEQVARAVFSVLRAVAMIALAFVTGGATAPGAAASAGQAVSIAGQAAQALQRVVEILDRLEAVMEVVAAVKDLVDSLEQVGQIVEAPVMPDMPSEADWSIFVNEIEAVAEGMPTEVSEVPAWKAKCKNVAALGREMSITAVQISELQYDIWVHGLMRDMARSQADRLAAIQPADLTNYLEMATQMDMRTTRMLLGLLNMLHIQNAALMYEYLLTPTELTAWPLGMDIVANLLIAQENAALLGLVQLGPPSDFTSKHVVKGIPVSLLLDGEDWEFEIPVEGGMSSFPSSWTRVRIRHLEMHFVQEMSGGSEIIHQPATQTGTVYILLQGSTTFHDRRRDEVMTFQAAAPLNYHYAYRLDTGEATLTNEPSEQFANTFMQMTPFTRWRLRLSASAAENAGLGFPTATAPDSTTEIVITFHVTAIRQIDWRHEEEEE

SEQ ID NO: 763 - protein, 827 aa, Asplenium trichomanes
MDYSTLYRDLNQISMPVDHVEFSEVMVIHRMYVRLSDLDVGELAGAEKVKRLYLFADVVELAPELAPGKRTQMPGSITVIILCRLLQFPTDGSRAATLQLPFMKLHAILRERYRSEITAADGTNWGTYIHGDEVQVSPLYTNNSVLPVWADRSIITSAFHNVLDEPGRVISSTSITMAQAAPNNTRMTAEPGWVFGNRFLLYTVSSTAFSVLPLQSTNISFTSIPVEVVADPNILLGMQTTVHIAELVKVQNESQLQGTESYNECLALLGRVQSVMKIGRSGSVVPQLQYRMYGSLIKQMAQAAQNYDQEFRQFKLFIIQNQILGSYLLQQNKAFADRELQMESFHSAVISQRMQELDTAIAKMDRLSLQMEEENKAMEQAQREMDEGLRRFRNEQVARAVFSVLRAVAMIALAFVTGGATAPGAAASAGQAVSIAGQAAQALQRVVEILDRLEAVMEVVAAVKDLVDSLEQVGQIVEAPVMPDMPSEADWSIFVNEIEAVAEGMPTEVSEVPAWKAKCKNVAALGREMSITAVQISELQYDIWVHGLMRDMARSQADRLAAIQPADLTNYLEMATQMDMRTTRMLLGLLNMLHIQNAALMYEYLLTPTELTAWPLGMDIVANLLIAQENAALLGLVQLGPPSDFTSKHVVKGIPVSLLLDGEDWEFEIPVEGGMSSFPSSWTRVRIRHLEMHFVQEMSGGSEIIHQPATQTGTVYILLQGSTTFHDRRRDEVMTFQAAAPLNYHYAYRLDTGEATLTNEPSEQFANTFMQMTPFTRWRLRLSASAAENAGLGFPTATAPDSTTEIVITFHVTAIRQIDWRHEEEEE

SEQ ID NO: 764 - protein, 903 aa, Phyllitis scolopendium 'Angustifolia'
MGVTVVSDELCLLDLDEGSEEWVKDEEAIKAARSSTPEVNYEALYANANQIARDLRVGSVPCGELLSVNGRMFVRLDSLDVSRLRQPERVQNLIVLADVVEISGRDLVLPGASSVRIICRILHLRSRDVQLDLPYAWRTSSQTQPFQFSLRAQQIVVSPSAAPPSLSSTGALVVRLHRELNQWATTRTRFTQYVVRCFGYTASSVNSTVNINIPVSAETPPSFHWLRVNSENLNLKVNQDAVWRAHVDVQVALPSQLDLNDLHVMMGMESTLLTAEMILSYRSDRPDVVALAVEHVEWIRMSLVQNHEQQPNLPDNQFALLARAEMLAKLSIDGSQSLVVPQLEYTAYSEVIRQIAVVAEAYNQEFTQLHLFVQQTTILGDYVLNTVKALAEKEKDIALLEEAVVRGKQSELDIAVEKIERLEQQILKQIEEVQEAKEDMEKGIIAYRNRLIANAFFEVLSAVLQIAGSFVYFKTGQITDGLAALGGGLASANQAIWLIVDAVDAKNSLSNITDNLVDVEKAMKVVNAVLALVDTVTNLDELLDAPRMPDVDSSHWDIMENEIEIVAAQLPTEVSEVRVWSLKCRNVVIVCREVCTTAAAIMQLQYELFVHARKKEISERHAERLAQIQAVDLGDYLELASQADMRTVRLLIQLLDLLATQNGALQYHYLLPPEPFVGWPTIDNVRRMLVARQQQAVISQTSLGPSYRVRTRLVLDSVPVGLLLSGEDYSFTIAPISEQSIPVFPAVWSRVRIEELQMVFTAGTTGAHMPVAGPGGKVYLLLQPSSTFHDRLRYQAFNYQAAAPRPFQYVYDLATGEPSLVSRPSEPGLFLRMTPFTRWRLRLSASAYQNEGISFPTATAADSVAEITITFELTAIVHPQSFLEEDGITFLMPGKGGDDQVVS

SEQ ID NO: 765 - protein, 903 aa, Phyllitis scolopendium 'Angustifolia'
MGVTVVSDELCLLDLDEGSEEWVKDEEAIKAARSSTPEVNYEALYANANQIARDLRVGSVPCGELLSVNGRMFVRLDSLDVSRLRQPERVQNLIVLADVVEISGRDLVLPGASSVRIICRILHLRSRDVQLDLPYAWRTSSQTQPFQFSLRAQQIVVSPSAAPPSLSSTGALVVRLHRELNQWATTRTRFTQYVVRCFGYTASSVNSTVNINIPVSAETPPSFHWLRVNSENLNLKVNQDAVWRAHVDVQVALPSQLDLNDLHVMMGMESTLLTAEMILSYRSDRPDVVALAVEHVEWIRMSLVQNHEQQPNLPDNQFALLARAEMLAKLSIDGSQSLVVPQLEYTAYSEVIRQIAVVAEAYNQEFTQLHLFVQQTTILGDYVLNTVKALAEKEKDIALLEEAVVRGKQSELDIAVEKIERLEQQILKQIEEVQEAKEDMEKGIIAYRNRLIANAFFEVLSAVLQIAGSFVYFKTGQITDGLAALGGGLASANQAIWLIVDAVDAKNSLSNITDNLVDVEKAMKVVNAVLALVDTVTNLDELLDAPRMPDVDSSHWDIMENEIEIVAAQLPTEVSEVRVWSLKCRNVVIVCREVCTTAAAIMQLQYELFVHARKKEISERHAERLAQIQAVDLGDYLELASQADMRTVRLLIQLLDLLATQNGALQYHYLLPPEPFVGWPTIDNVRRMLVARQQQAVISQTSLGPSYRVRTRLVLDSVPVGLLLSGEDYSFTIAPISEQSIPVFPAVWSRVRIEELQMVFTAGTTGAHMPVAGPGGKVYLLLQPSSTFHDRLRYQVFNYQAAAPRPFQYVYDLATGEPSLVSRPSEPGLFLRMTPFTRWRLRLSASAYQNEGISFPTATAADSVAEITITFELTAIVHPQSFLEEDGITFLMPGKGGDDQVVS

SEQ ID NO: 766 - protein, 876 aa, Phyllitis scolopendium 'Angustifolia'
MEYGSLYGDVNQVSLRFENTEVSEVMVVHRMHVRLEELDMSNDKLKRLYVLADVVELPSQRKTIVIPATVSAIIMCRVLYIPYIWTVFDNCTVLLPHMRFRVVETSLTLRTGQFFALPSSDTVDNGAGSFGGLYIHADRFIYRQATSFTSDWVQPLQLRVRGSSTFSSTFRDPDWPETLPVTNLNQTITLSLGSFLTPSDSDLQRSDEIEFLQTEPQRVQVVFNRPGGTTGVALLVENSPEISFFPAPSLEHVPADVLADPSIILGMQMNMLSAELVRAAHNSQQVIKAVTKHVEWLSKILLQVASPSDDILALLFRVQAFIKMAKQSRFVVPRLQYHVYSNLINRMVQVAQDYDQEFRQLRLFIAQNEILGSYLLQQNKAFADKEKDMSAFHSQVVSMRRSELTSTIEMMGRLSLQMETEGEAMDEARDSMVEAIQEYERKQLARALFAVLGAIASVALAFATGGATAPAAVAAAGAAVTAAGRLAEGLRRVVEILEGLQAIMEVVAAIRDLVESLENMGQLVGAPEMPEMPTNADWLIFVNEVEAVAEQVPEEVSEVPVWKAKCKNVAVLGQEMCTTAAHISELQYQIRVEEMLQEIAQRQADRLMGISAADLSSYTEMATQIDMRTTRMLLQLIKMLYIQNAAIKYEYLYAASERLNSWPVTMQTVWTMLLQQENAAILGLLDLGPSNDFTVTHVVKDIPVKLLVDGYDWHFEIPVEDSAIFPAGWSRVRIRYVELKFGKQGTDSNIVIHQPSTNTGLIYVLLQSSRFLSDRKREEVMDYEASTGLAYAYAYDLSTGATTLTNIPSEAHANTFMQMAPFTAWRLRLSASAMENQGLVFPTATSPDNTTQISITFYVTAIRRIDTRRQRADAEL

SEQ ID NO: 767 - protein, 883 aa, Phyllitis scolopendium 'Angustifolia'
MEYSDLYEDVNQVSLRFQQTEFSEVMVVHRMYFRLLDLDMSTGPSFLMFPGSEKVRRLYIVADIVELPANGINMRLPATVSVVILCRVLYVQDVNSPFLTCGLHFPLMRMRVVETQEGTVRVFPVPDSSSSSGGSTDIGLFIHADRFIYRQDTSTLDPLQPLQLRVIGGSTFSTVRPGWPETLEVFSLILWLTLSKGQPIPATESDLQRSDEVELLPPPSPDRLLVVFTGLAPGNIGSMSVDVEYIGAGFSYFSIPPVDPVPTEVLSDPYIILGLQMNMLIAELVLAAHNSPRVINVVTKHVEWLNKILRPKLDLPNDDILGLLFRVQTFLKMAKQPRSVVPRLQYHMYSSLINRMVQVAQVYDQDFKQLKLFIAQNQILGSYLLEQNKAFASKEKDMSSFHSQVVSLRRTELNNAIDKMDQLSVQMENENQAMDQAKEDMMQAIEEYEKKQLANALFAVLGAIASVALAFATAGATAPAAVAAAGAAVSAAGRLAEGLKKVVEILEGLAAVMEIVAVIRELVESLQNLGSLIDTPDMPDMPSDADWLIFVNEVEAVAEQMPADVVGSVAVWKAKCKNVAVLGQEMCTTAAHIGELTYQIKVEEMLQEIAQKQANRLEGITPADLSSYTEMLSQIDMRTTRQLLQLIRVLNIQNAAIKYEYLYVASRQLDSWPVSMDTVWSMLLQQETSAITGLLDLGPSTDFTRTFVVKNIPVGLLVDGRDWQFVIPVEDSPTFPIGYSRVRIRYVELKFEQDSNDGSVIHQPRTNSGLIYMLLQNSQLFSDRRRREILDYEASMGLAYAFAYNLTTGVPTLTNIPSDEHANTFMRMTPFNNWRLRLSSSAEENRGLAFPTANSLDDITQVSITFYITAIRGIDTRREVDEE

SEQ ID NO: 768 - protein, 880 aa, Phyllitis scolopendium 'Angustifolia'
MEYGSLYGDVNQVSLRFEKTEVSEVMVVHRMHVRLEELDMSSDKLKRLFVLADVVELPSQRKTIVIPATVSVIIMCRILYIPYIWTVLDNCTVLLPHMRFRVVETSIAPRAGQFFALPSSDSVDNGAGSVGGLYIHADRFIYRQGTSFTSDWSHSDWVQPLQLRVQGSSTFSSTFRDPNWPETLPVTNLNQTLSLSLGSFLTPSDSDLQRSDEIEFLATEPQRVQVIFNRPGGSTGVLLFVENSPEISFFPAPSLQHVPADVLADPSIILGMQMNMLSAELVLAAHNSQQVIKAVTKHVEWLSKILLQVASPSDDILALLFRVQAFIKMAKQSRFVVPRLQYHAYINLINRMVQVAQDYDQEFRQLRLFIAQNEILGSYLLQQNKAFADKEKDMSAFHSQVVSMRRSELTSTIEMMGRLSLQMETEGEAMDEAKDSMVEAIQEYERKQLARALFAVLGAIAAVALAFATGGATAPAAVAAAGAAVSAAGRLAEGLRRVVEILQGLQEIMEVVAAIRDLVESLENMGQLVAAPEMPEMPTNADWLIFVNEVEAVAEQVPEEVSEVPVWKAKCKNVAVLGQEMCTTAAHISELQYQIRVEEMLQEIAERQADRLMAISAADLSSYTEMATQIDMRTTRMLLQLIKMLYIQNAAIKYGYLYPASERLNSWPVTMQTVWTMLLQQENAAILGLLDLGPSNDFTVTHVVKDIPVKLLVDGYDWHFEIPVEDSAIFPAGWSRVRIRYVELKFGKQGTDSNIVIHQPSTNTGLIYVLLQSSRFLSDRKREEVMDYEASTGLAYAYAYNLSTGATTLTNIPSEANANTFMQMAPFTAWRLRLSASAMENQGLVFPTATSPDNTTQISITFYVTAIRGIDRRQGADAEL

SEQ ID NO: 769 - protein, 880 aa, Phyllitis scolopendium 'Angustifolia'
MEYGSLYGDVNQVSLRFEKTEVSEVMVVHRMHVRLEELDMSSDKLKRLFVLADVVELPSQRKTIVIPATVSVIIMCRILYIPYIWTVLDNCTVLLPHMRFRVVETSIAPRAGQFFALPSSDSVDNGAGSVGGLYIHADRFIYRQGTSFTSDWSHSDWVQPLQLRVQGSSTFSSTFRDPNWPETLPVTNLNQTLSLSLGSFLTPSDSDLQRSDEIEFLATEPQRVQVIFNRPGGSTGVLLFVENSPEISFFPAPSLQHVPADVLADPSIILGMQMNMLSAELVLAAHNSQQVIKAVTKHVEWLSKILLQVASPSDDILALLFRVQAFIKMAKQSRFVVPRLQYHAYSNLINRMVQVAQDYDQEFRQLRLFIAQNEILGSYLLQQNKAFADKEKDMSAFHSQVVSMRRSELTSTIEMMGRLSLQMETEGEAMDEAKDSMVEAIQEYERKQLARALFAVLGAIAAVALAFATGGATAPAAVAAAGAAVSAAGRLAEGLRRVVEILQGLQEIMEVVAAIRDLVESLENMGQLVAAPEMPEMPTNADWLIFVNEVEAVAEQVPEEVSEVPVWKAKCKNVAVLGQEMCTTAAHISELQYQIRVEEMLQEIAERQADRLMAISAADLSSYTEMATQIDMRTTRMLLQLIKMLYIQNAAIKYGYLYPASERLNSWPVTMQTVWTMLLQQENAAILGLLDLGPSNDFTVTHVVKDIPVKLLVDGYDWHFEIPVEDSAIFPAGWSRVRIRYVELKFGKQGTDSNIVIHQPSTNTGLIYVLLQSSRFLSDRKREEVMDYEASTGLAYAYAYNLSTGATTLTNIPSEANANTFMQMAPFTAWRLRLSASAMENQGLVFPTATSPDNTTQISITFYVTAIRGIDRRQGADAEL

SEQ ID NO: 770 - DNA, 57 bp, Artificial Sequence
  Synthetic
cgaaatctctcatctaagaggctggatcctaggatggattacagcacgctttacagg

SEQ ID NO: 771 - DNA, 58 bp, Artificial Sequence
  Synthetic
taagttggccaatccagaagatggacaagtctagactactcctccacctcctgcctcc

SEQ ID NO: 772 - DNA, 52 bp, Artificial Sequence
  Synthetic
cgaaatctctcatctaagaggctggatcctaggatgacgatggcggcaactg

SEQ ID NO: 773 - DNA, 57 bp, Artificial Sequence
  Synthetic
ggccaatccagaagatggacaagtctagactagaaagaaattttcctgatagctgag

SEQ ID NO: 774 - DNA, 58 bp, Artificial Sequence
  Synthetic
cgaaatctctcatctaagaggctggatcctaggatggattacagcactctttacacgg

SEQ ID NO: 775 - DNA, 56 bp, Artificial Sequence
  Synthetic
taagttggccaatccagaagatggacaagtctagactactcctcttgccgccagtc

SEQ ID NO: 776 - DNA, 52 bp, Artificial Sequence
  Synthetic
cgaaatctctcatctaagaggctggatcctaggatggctgcctccgctgctg

SEQ ID NO: 777 - DNA, 58 bp, Artificial Sequence
  Synthetic
taagttggccaatccagaagatggacaagtctagactagaaagaaatgcgccggatag

SEQ ID NO: 778 - DNA, 57 bp, Artificial Sequence; identical to SEQ ID NO: 770
  Synthetic

SEQ ID NO: 779 - DNA, 58 bp, Artificial Sequence
  Synthetic
taagttggccaatccagaagatggacaagtctagactactcctcctcctcctcgtgcc

SEQ ID NO: 780 - DNA, 55 bp, Artificial Sequence
  Synthetic
cgaaatctctcatctaagaggctggatcctaggatgggtgtcacagtcgttagcg

SEQ ID NO: 781 - DNA, 58 bp, Artificial Sequence
  Synthetic
taagttggccaatccagaagatggacaagtctagattagctgacgacctgatcatcgc

SEQ ID NO: 782 - DNA, 56 bp, Artificial Sequence
  Synthetic
cgaaatctctcatctaagaggctggatcctaggatggagtatggcagcttgtatgg

SEQ ID NO: 783 - DNA, 56 bp, Artificial Sequence
  Synthetic
gttggccaatccagaagatggacaagtctagactataactccgcatcagctcgttg

SEQ ID NO: 784 - DNA, 58 bp, Artificial Sequence
  Synthetic
cgaaatctctcatctaagaggctggatcctaggatggagtactccgacttgtatgagg

SEQ ID NO: 785 - DNA, 56 bp, Artificial Sequence
  Synthetic
taagttggccaatccagaagatggacaagtctagatcactcctcatcgacttcccg

SEQ ID NO: 786 - protein, 932 aa, Adiantum peruvianum
MATFEEYHPEQYMELYKDFNQVRERLSLEMMEFSEVMVIHRMYLKLEELDVGHLEGAEKVKHLYVFADVVEMRSREDELEPVARLPGSVSVAIICRVLWIRRQGSVTRETLIAFPHLKVHLKMTGARSVNVYRTHHAAETDDGFVLCIDAGSIQRTSDESTTSGILFSLFSYHFVRSPTLDGKNITFSSDTDSSISNLPVVHFPFYTQGWRWSVTTAGILSFAPSSVTSTTTVHATGSLQTYDFTHLTFAPGFWIMRGIPESLLKDDKLLLFLQTSLLISELAELAHPSSETRNAVLTHVEWLSKILINGESKTEGTEFHHEMQTSLLISELAELAHPSSETRNAVLTHVEWLSKILINGESKTEGTEFHHEYLALSFRAQYMLKTARSTRSLVVPQLQYDVYGPLINRMAQVAQIYDDAINQLKLFVSQNKILGSYLLEQNKTFAARERDMEVFYAELISQMKIELDSTLLKMDQLGAQMEAQSADMEEAQREMEEGLRRFRNRQVAEAMFSVFRAIGAIALAFLTGGATAPAAMSSARRAVTAAEQAARALARVLDILEGLQAVMEVVAIIKDLVESLQNVGQLVDAPDMPEMPTEADWGIFVNEIEGVAEEMPEEVSEVSAWKTKCKNVAVLGRELMTTAAYISRLQYDIQEHAMLQEIARRHADRLSTIQAADLSSYTEMVTQMDMRTTRIMVSLIKVIYMQNAALMYQCLAPPTQVWQWPSLSMETVWTMLMQNEHVAILGLTRLGPSFDFKRIYVVRDIPVSLLLAGQDWEFEIPVSDHTTFPSTWSRVRIQHLEMKFDAGGGAHQPITDTGKVYILLQGSRAFHDRNQVGRLPLLYEAALPLDYHYAYRLDTGETTLSNLPSTNFLDTYMRMTPFTNWRLRLSASAEENKGLDFPTARQESSIKEEATTQIAITFHVSAIRQISF

SEQ ID NO: 787 - protein, 728 aa, Adiantum peruvianum
TNHRHDKELFLPSMNMSMAAAGDMSFLGVNVSTTTVSSSSDVLEFKLQSGSMTSAMRLKDVDAAATLTCIVQTASPSMPLSVMTTGASPGNVWVLGMTTAVVVPASAVAVITDANILLGMQVTVQVAELVKTTHNSDVVIAASTRHVEWLNQLLVQAHAVAPNEDIVTLLYRTQALLKLQREGLVVPRLQYHMYKSLIDRMVQVAQSYDQDFNRLKLFVEQNKILGSYLLEQNKAFAEKEKEMDAFHAQVIELRTAELNGTIDRMDQLSEQMDKENEAMEQAKADMDAGLVEYQNRQVANALFAVLGAIASIGLAFATGGATAPAAVSAAGAAVTAAGQAAAGLRKVIEILEGLQVVMEVVAAIKELVQSLQEIGKLVDAPEMPELPSNADWEIFVNEVEAVAEQMPTEVTEVAAWKAKCKNVAALGREMSTMAAHIAELQYQIQVQEMLREIAQRQADRLSSIRPADLTNYLEMVSEMDMRTTRMLLELIRVLYIQNAALQYEYLQTPAPLSAWPVTMSTVWNLLVQQETAAITGLLELGPPSDFTREYAVKDIPVSLLQEGQDWEFELPVFSADFPSAWSRVRIHHLAMQFDGSAATHVPTTRTGKVYILLQSSRFFDDRAKRANELISYQAGMGLFYQYAYRLSTGEATVTNIPTDEYANTFMRSTPFTRWRIRLSSSAEENEGLAFPTATTADATTQIKITFSVSAIRRVSTRALTANGVVAKW

SEQ ID NO: 788 - protein, 525 aa, Adiantum hispidulum
VRMCAGSCTHANFIEAGSQERRNYLFPSLIISVCACVCVFQFPPLDGVDARSCIKMEYSSLYGDVNQVSLRFEKTEVSEVMVVHRMHVRLEELDMSSDKLKRLYVLADVVELPSQRSTIVVPATVSAIIICRVLYIPYIFTVLENCSFFLSLMRFRVVETRIEPPRTGQFFALPSADAVDDGVGGFRGLYILADRFIYRQATSFTSDWVQPLGLRVRGSSTFSYRQATSFTSDWVQPLSLRVQGSSTFSSTFRPEWPETLPVTNLNHTVTLSLGSFLTPSDSDLQRSDEIEFLPTEPQRVQVVINRGPGSQTGLVLIPENSPEISETEPQRVQVVVNRGPGSQTGLVLVVENSPEISFFPAPSLEHVPADVLADPSIILGMQMNMLSAELVLAAHNSQQVIKAVTKHVEWLNKILLQVASPSDDILALLFRAQAFIKMAKQSRFVVPRLQYHVYRNLINRMVQVAQDYDQELRQLRLFIAQNEILGSYLLQQNKAFAEKEKDMSDFHLQVVSMRRSLGKLFATAK

SEQ ID NO: 789 - protein, 904 aa, Adiantum hispidulum
MAAAAPAARRRDYKELYQDLNQISERMRLDQMDFSEVMVIHRMYIKLEELDLGHLEGAHKVKRLYVLADVVEVEEGSNLHDQGPLARLPGSILVVILCRVLLVGIFVNVRTGTLLNNVMRLQLPHIKLRAVEVRSSITDSNFTLQMHRAQSTGEIYDQYPALTINADLVQCRMRWVHQQPSITSVSLSPRFFAFMPDRGSQDVIFSSESRSMVDRPVQIFYIYSNVLNVIRSHRLPFPEEVTIDLASWEHKEFYYLHVSTAPSVTLSKPSETIQATELEPAFSLLKRSVPAAVLTDPNILLAMQASLLIAELVEIAHPSPDTADEVAKHVEWLNKLLIQAASEREGTSSHHEYLTLLFRAQYIMKKIGRARHLVVPQLQYDVYSGLINRMAQIAESYDQSLRQLILFIQQNKILGSYLLQQNRAFADKERDMDVFYSELISQREVELQSTLLKMDQLSLQMETQREDMEQAQKDMEAGLRRFQNRAVANAMFAVLGAVAAIGLAFLTGGATAPGAMAAAGNAVTIAGQAARALQRVLDILDGLQVVMEVVSLIKELVSSLQDLGQLVEAPEMPEMPLESDWFIFENSIEEVAEGMPEEVSEVSAWRTKCKNVAVLGREMISTAVYISQLMYDIKVQGMLQEIAKSHAQRLEAIQAADMQSYTEMVTQMDMRTTRMLVELIKVVYMQNAALMYQSLSPPTSVNAWPVTMETVWNILLQHDHAALLGLMRLGPSFDFMRTYIVQDIPVSLLLDGEDWQFEIPVRDFTSFPSTWSRVRIHHLEMKFVKATHVHQPITDTGSIYLLLQGSRIFRDRNEDETIDYEAALPLDYHYAYRLDTEETTLSNLPSQEFTKTFMRMTPFSNWRLRLSSSAEENKGLAFPTATSADSTTQIAITFYVTAIRRISF

SEQ ID NO: 790 - protein, 699 aa, Adiantum pedatum L.
RRAPCGGFSRSRTATGFSRLPANTGGQRVARVWQPISDYVDLFASVLPLNFARATHFVSSFEPAFWILTRGIPDSLLKDDKFLLAMQTSLLISELAQLAHPSSETRTAVLEHVRWLSAIVVDGASKTKGTELHREYLALSFRAQYMLKTASSTRSSLVVPQLQYDVYSPLINRMAQVTQIYDDALNQFKLFITQNGMHGSYLLEQNKALAARERDMEVFYSELISQMKIELDSTLLKMDQLGAQMEAQTEDMEQAQREMEQGLRRFKNRQVARAMFSVFAAIGAVALTFLTGGAAAPAAMSAARTAVTAAEQAARALQRVLDILEGLQAVMEVVALIKELVESLQDVGKLVEAPDMPEMPTEADWEIFVNEIEGVAAEMPEEVSEVSAWKTKCKNVAVLGREMTTTAAYISRLQYDIKEHAMLQEIAKRHADRLSTIQAADLSSYTEMVMQIDLRTTRIMVSLIKVIYMQNAALMYQYLAPPTHVWQWPSLSMEAVWTMLMQNEHIAILGLIRLGPSFDFKRTYVVRDIPVSLMLAGEDWEFTIPLSDHTTFPSTWSRVRIQHLEMKFVDDDDAASVHQPITNTGKVYILLQGSRAFHDRNQVGRLPLLYEAALPLDYHYAYCLDTGETTLSNLPSTSFLDTFMRMTPFTNWRLRLSVSAEENQGLDFPTARQQGTINEEATTQIAITFHVSAIRHVSF

SEQ ID NO: 791 - protein, 896 aa, Adiantum pedatum L.
MQLSGGQGQVYQSIMAAAAREYSELYKDLNQISERIRLDQMEFSEVMVIHRMFIRLEELDLGHLEGAERVKRLYVFADVVEVEEGGNFIETGPLARLPGSIMVVILCRVLSVRVLMFDNGNNAMRLQLPHMKLRVVEITTQPTTKLQIHRADAEDYQYPALCIHADVIQASIRLSSSSNRPPMDLRFFNFRPNRGSDNVVFSSESRSLIDEPVEIFYVYSHIPRFIHALPIPEAATVDPASRSNDWYYVSLRRVNSTLSSSVAAEGELEPAFSLLKPKIPVVVLTDPNILLAMQTSLLIAELVEVAHPSAETADAVAKHVEWLNKILLQATKVEGILNSSHDEHLALLFRAQYLMKMRPGRTRNLVVPQLQYDVYSNLVNRMAQVAESYDQSLRQFKLFIDQNKILGSYLLQQNKAFADKERDMDVFHSELISQRKIELDNTILKMDQLSLQMESQREDMDQAKKDMDAGLREFQNRQVANAMFAVIGAIAAIGLAFITGGATAPAAVGAAKTAVTAAGAAARALERVVEILDSLQAVMEIVSIIKELVSSLQEIGQLVEAPDMPPMPTEADWFIFENEIEGVAEQMPTEVSEVSAWKTKCKNVAVLGREMITTATYISELQYDIKVQGMLQEIATSHANRLSSIQATDLSNYTEMVTQMDMRTTRMLVALINVVHMQNAALMYQCLSPPTYVNAWPVTMETVWSMLVQHEHAAVLGLMRLGPSFDFMRTYVVEGIPVQLLLDGEDWEFEISVEDYTTFPSTWSRVRIHHLEMKFVQAADVHQPITDTGKVYMLLQGSRIFRDRNRADAIRYEAAMSLDYHYAYRLDTGETTLSNLPSQDFTRTFMRMTPFTNWRLRLSASAEENKGLGFPTATSAGSTTQIAIIFYISAIRRISL

SEQ ID NO: 792 - protein, 845 aa, Adiantum pedatum L.
VDYESIYKNAHEIGTVVGTDKIPCSEVMVCHRMYVNLDTFRVEQLVGYANVKQLIVFADVVEISCRWTYKLFLPFHTDFRIVCRLLKMKDDHEAIYLDWQRMDGRWMDSLYLPFHTDLRIVCRLLRMTEDHASIHLDWQLVNNSRCAIYAQELVSSTSNTPRLNLLVSRRTIHTNVPDRIIDIKNIVLYYNSQRDYDFTYFDEKTKVEYSYSVSVHFGSTPSVEVLAEDNILTGLQSTILITEMILNYRADLQDAVTAAFAHVTWVNLCLLQVVGRTDVKGADKLLSLLARVQALLKLPTDGSQSLIVPRLEYSAYEKLIAQMATVVESYNNEFVQLSLFIQQNEIMADYLLEQNKVFAAKEKDIAELESMIVDRKSQEMVKAFEKMNSLDAQLAQQVEEMDRAKEQMDAGIQKYKNDQVAKAFFSVIKCILSVGLAIVTGGAASGAAVAGTVAVVEKVSELANMLTKVTEILEGLEALAEILSAIKNLFEAIEDVNNIVEAPEMPEMPSAADWDIFENEIEAVAEQMPQTVSEVSLWKAKCKNVAAVCREISTTAAYIGQLEYDLFLHRKQQEIAAAQAKRLESIQPADLTNYLEMATQLDMRTTRLLVGMHKILTVQNGALQYHYLLEPKLLTGWPTMDRIRSRLVQNEQNAVLALERLGFSTDFVKTYVLSDVPVHLLLSGEDWNFNILEDDPTFPSNWSRVRIVYLEIKFSGDHLPITSTGEVYFLLQASRVFHDRLEGAYLKYEAGTPLEYQYAYILQTGKTTVTNKPTEEEDGKFLRMTPFTKWRLRLSASADENKGLSFPSAANALDSTTQISITFYLTAIRKISTRHGELGTTSDNE

SEQ ID NO: 793 - protein, 851 aa, Adiantum pedatum
MDVDYAAIYKDVNQVTRTVATSQCSEVMAIQRLYVRLNDLDVKGLRNVEVVKQVVVFADVVEVEGGDVLELPGSTQITIVCRVLHTKHPSGAVIRLSSLAPVKCHGREHRHASGPRTHSVTPMNGQLASDGQIVTILATEVVAPAGASLQVQCPVLVDAKIYDSDGYHPDFFYDLNGTASWSSLPFGGATGTTAATARSFQTTTIAPLSWITWTMNEVDWQPSFRVVLPETLPPRLLVNSSILLAMETNILASELISEFQREAVQTTAAVHQHTIWLDDQFQLAVRSSQRQDQLQSQQIRNLHFRVQSLLKLHRMDSNAPLVVPPLQYEQYDKLINLMTQAAQSYDNDFKNLNLFMQQNEILGNFLLDQNKAFAQKERDMEVHHSQLVGLQDRELELTREKFDSLLITLDQQNREMEKAQADLEAGIKQYRDRQIALAVFGALLAVAQLCFAVFTGGATAGAAVATAVQLSETAKVLQSVVKLLQRIEKVVTTLYAFIDFLSEMQSLEQIVNAPEMPELPTAADWYIFENEIVAVAETMPTEISEVPVWKAKCKNVAAVGREIITTAVYMQKLQYDLAVNRMLQQIAQQQAERLESLQIKDLDNYLEMATELDMRTTRILMGLLKVLSLQTGALSYHYLLEPRPLTGWVRMDAVWNALLKNATDAVVALSTSGASNDFVVRYTIKGIPVNLLLEGMDWIFDIPVDDPAFGESHWSRVRIEYIEMKFDSSSDGHLPTTTGGQIYFRLQAGRFFDDRLGHQILHYEAAVPLVYQYAYRLASGETTVSNRPSLSSSTHYMRMTPFTRWGLRLSASAPENRGLAFPTATTEDATTQITLTFYVTARRRISNFFLH

SEQ ID NO: 794 - protein, 766 aa, Adiantum pedatum
HYGFKANRYCAAGGVVIRLSSLSPVDCSAKLITDTTDIKPDDTVLQIDDFNWEVTPKTAAGRVVTILASHLVAPVGAQLRVHCPVNVEYQTNVIWPPVFTTVAGTVEWRISPYSAGASAAQSFAAATTSTFAGTAGLIWTVLKKWYPSFKIVLPEVIPLELLANSNIVLGVEVTTLVSELIMAYQRQATETVAATLHHVEWLNAQLLSAQSSGQLQALHFRVQSLLKLTVDDDNAPLVVPPLQYEVYDGLINVMTRAAESYDNAFVQLNLFMQQNEILGSFLLDQNKAFAAKERDMETHHSQLVSLQDAELTKTNESIKSMNNELAQQNQAMDKAKADMEAGIKQYKDRLIAEAVFGVFTAIAQVCLAIFTGGATAAAAVETAGKLSETAKALESAVKHLEKLQKIVQVINSITDFLSNLQSLNQLIEVPKMPDLPTEADWDMFENEIVAVAEGMPTEISEVPMWKAKCKNVAALGREIIRTVAYMQQLQYDLAVNRMLQNIAQQQAERLEGLHIQDLDNYTEMATELDTRTNRLLMGLLKVLSLQTGALSYHFLLPPRSLQGWVNMDTVWNTLVKNEYDAVRGLGSLGSAPTDTIQTYVVRDIPVGLLLEGNDWFFDIPVDDPAIPPPWFRVRIEHVELKFPTTNPIVHRPTTRNGEVYILLQAARFFSDRLIDEVLHFQATKTVSYQYAYRLDSGETTLHNRPTASSSTHYMRMTPFTRWRLRLSASAPQNEGLAFPTATTEDATTQITINFHLTALHRIQFRA

SEQ ID NO: 795 - protein, 881 aa, Adiantum pedatum
MAQGKELLTVDGVVDYEALYGEVNEIARAVRTHKVSCSEVMVINRMFVRLDTFSVEHLQQPGVVKSFIVVADVVEIEGSSSSLTLPGSSLILIVCRRLQLKNKNVILDLTWNLAATNVKSSQLPRCSIYTQHVDVPNAGSTLRIQVKRELKWSNGSSFTHYFGREFSYSNSTKTFSTTSSAPANYSVSSVGQPPASKLILVNSRKMNILTNDIRWKGFIDLQVNALPPLNDLAHPNVIEAFESNLLIVEMILNYQTNMQDLVTAAKDHVQWINQSFLEVVDWSNPEVGLQLKALLGRAQLLLKMPSDGSQSLIVPQLEYDGYDRVIQEMAKVAESYNREFRELSGLILNNEIIGQNILKQSKILGAKETEVQNLESLIVLRKEKELDRAIERLELLQNQLIRQVNEMETAKEKLDQGLKEYKHKQIARAFFQVLGAMMQIMGSCRLSSIPDFAVAFGGGISAAISAAEKVEDASVRNTLQNVANKLRNVEIVMEVVNSVKDLYTNASNLEDILNSPQIPDVPSSDWEIMRNDMEEVAAGMPTEVSEVSTWQAKSKNVVAVCEEICATAISISQTQCDLFVHVKQQEIAQRQAERLNQMQAVDLGDYLEMATQLDMRTMRVLICLLKMLGIQNGALQYQYLLAPKPFIGWPTIDTVRMEILRRVELAVLAKVELGSPVMLTRNYVIESIPVGLLISGDDWNFSFDASDNSVFPSTWSQVRIQYLEMKFTGEHCPITETGEVYLLLQASSKFEDRWKKQVFQYEAAAPLTYQYAYNLQSGKTTIPNKPHVEGTFLRMTPFTRWRLRLPASALENRGISFPTTTSLDNFISISITFHLTAIAQIQSKSLGIVYNLFDDDDDDDDEQGEGGEQGGGKSRGEEEVL

SEQ ID NO: 796 - protein, 890 aa, Adiantum pedatum
MAGAEDESMSTMYEGISTGSTAASDDELQDDMSFMYNYIQKSVDADRDSDYEAIYNGVNQIARAVGIRNRVESGEVLAIHQMFVRLDTLSVGNLLRAERVKYLIVFADVVEIEGADLTLPGSDLVLIACRLLRVKNQNVVLNLSWNIASSSTPPRCSICAQRVIITSSTAVANCTLRIQVMHALQWSDKSPFTQYFGRKFAYSSQNSSITAAPPNESSSSLGKPPSSRLILVNSKTMNILINNIRWKGYIDFQVGLPSSDDLIDPRVIEGIESTLLIAEMILTYQTNARDAVEAAKKHVQWINMALLQVVDSQNSEAGLRQKTLLARIQMLLKLSMDGTPGLVVSVLEYGIYDRVIQDLIRVAELYNNEFNQLNLFIQQNQILGDYVLEQSKVLAEREKDVEALESSIVARKQDELKESINTVESLEEQLQRLASEMEDAKDKMDKGLQAYRDKQIAYAFFTVLGAALQLGGSLKLSSSVEMVIGIGATVSEAVNATKEVTNAVASNNLMEVANKLVDVEKVIKVVNAIKELHDNETKLDDILTAPMMPVISSSDWDIMEDNIEEVAATMPTEVSEVVTWKTKSKNVIAVCREICTTAISVSETQYELFVHGKQQEIARRHTERLMKMKAADLGDYIEIAKQVDMQTMRLLIILLGNLAIQQGALHYHFLLAPEPLMSWPTIDTVRRHLIQQAEKAVWAEERMGEPVKLTQIYVLEDIPVSLLLAGNDWIFTIEPSETTVFPSNWYRVRIRYIEMKFTGENLPQSPETGRVYLLLQASSTFQDRSRGREVFQYEAATPRNYHFAYEVQSGVTTVHNEAAEGGRRFLMTPFTRWRLRLSASAIENQGVSFPVATSATISITFHLTCIVRVQSYRSQEDDEDEDEDEDEDGL

SEQ ID NO: 797 - protein, 883 aa, Adiantum pedatum
MVNERFLVDLDERSEEFVKDAQTRSTVSTEVDYEHLYANANQLARDLRTRNVRCGEVLAVHRMFVRLDSLDVQQLQQAERVKRLIVFADVVEIQGSSVALPGSSLVLIVCRVLHLKSRDVQLDLPFAWDTTAHDSPRCSIRAQQVVVSPSAAPPHLSSDGSLIIRVTHNMGWSNGSSFSQYIVRCFGYSESNSNSSVHINLPVATTRPPSFHWMRVDSEKVSIRINQNIDWTAHINFQVALPSADDLDNLHVVMGIESTLLIAEMILSYRSDRQDVVAAALEHTQWISMSLAQKEVVEGQPKSDLHELKLALLARAQMLQKLPLDGSQSLVVPQLEYGAYSEVIREMTDVAEAYNREFIQLHLFIQQNEILGDYILTAVRNLAEKEKDVASLEDAVVRGKEREIEIAMEKITTLEGQLLKQIEEMTDARDAMEQGVIVYRNKRIASATFEVLGAVLQIAGSIALFATGQIASGLGALGGGISAAVAAAEAVEDAASIKDSLLNVTDQLVEVEVAMEVVNAIQKLVASATDLEDLLAAPPMPIIYSSAWDIMENEVESVAAQMPTAVSEVPVWKAKCKNVVAVSREVCTTAIAISHLQYELFVHARKQEIALRQAERLAEMQAVDLGECLELASQADMRTTRMLINLLDMLATQNGALQYHYLLPPAPFVGWPAIDSVRTLLVQRRQQAIIAQTTMGPSYKVNTRVTLDSIPVGLLLSGEDFSFTIQAISEDTIATFPDVWSRVRIEDLSIVFTGGHQPSSSTTGEVYLLLQPSSSFHDRLRHQVLNYEAAAPRPFQYAYNLSTGHPTLTSRPHEEGLYLRMTPFTRWRLRLSSSAYQNRGISFPTATAPDSSTEITITFDLTAIVHPQTSVEYDNNPEIVDQP

SEQ ID NO: 798 - protein, 877 aa, Adiantum raddianum
MDVDYAADAMDVDYAEIYKEVNQVTRPVPTRVCSEVMSIQRMYFQLDDLDAKLLRNTEVVKRLYVFADVVEMVGQSVELAASVEVVILCRIFKTTRSDAVLRFLSLTSRLECDATPVYASANVVSHFFVRPRPGAADPRLLITIHATQLVAPARTQLRVQRPNVVLHRAQFWALEEIFMPGGVSTGATQPVLRPAVTQDGAMEWRISPYVAGGALAARSFHFTHPHVYRTSQDYLGFTGIFIPEPIPYDLLTNSNIWLGMECTTLICELIDKYQRQATQTVEAAHHHVAWLDKQLLSMGNRITSSNIPKKNVQQIETLHFRVQSLLKIYRRTANGVDAPLIVPSLQYDVYDRIINLMTRAAESYDNDFKQLNLFIQQNEILGSFLLDQNRAFAQKERDMENHHLQLVTLQGHELQATGDKLQALNRQLAEQSEAMDQAKADMDAGIKEYRDAMIANAIFSVFKAIAALCLAAATGGAAAGAAAGAAVDTAAQLSELARVLQSVVKLLKRIENVVKTINAITAFLTELESLNQLIELPEMPEMPTDADWSIFENEIEAVAEGMPTEISEVPAWKAKCKNVAAVGREIITTVAHVEKLQYEISVSKMLQDIAQQQAERLEGLRIEDLDNYLEMATELDMRTNRILMGLLDMLSLQTGALSYHYLLRPRPFTGWVRMETVWRTLLQNESDKLVAIAALGAPQEFSRSYVVENIPVSLLKEGADWIFDIPVHDPVFPSLWSSVRIDYVEMKFPPDTTHLPTTKGGKVYFLLQAARFFHDRLQEDEVLHYQAAVPLVYQYAYHVESGETTLSNRPPQASSALYMRMTPFTRWRLRLSASAPENEGLEFPTATTEDATTEIAITFFVTARRRISTRVDSSSTT

SEQ ID NO: 799 - protein, 874 aa, Adiantum raddianum
MAAVQDFSDVEDFSELYKNAEHVQMGSVPDYYEIYKNVNQVTRAVASSQCSEVMSIHRMCFKLDMLDVKLLTKADTVKRLIVFADVVEIEGDMVELPASTEVTIVCRILSVKKENRQVEENVQVFFNLLESVVTAGDRNDRPAGISLSTSPEFRFCIYAQQVVSNSVVHLRVTQPVTYSDPGFTPPDADTAWMWLSMRIRNLPSRQHMLNANGPRKANGMPVWQTSRNVIERGPEWSRISVLAPVSVPLHTLADPTVILGMQSTLLIAELILSYQTDLPDTVSAAVQHVEWLNTKLLRVVDDNTLDMETTQELLALLARGESLLKMPVDGSHTLIVPRLEYGQYRGLISSMATVAEAYNREFMQVDLFIQQNEILGSYLLQQNKALAERERDMEAFNGLVVARKQEELRAAEERMKELEALLTQQTEAMDQAQEDMEAGLKRYRDEQVARAFFSVLKGVFAIGVAIATGGAAAGPAVKGAVGAVNAVSGLARTLSTVTKIMEMMVQVIEVLNAMKDLIAAISELNQMVEAPQMPTMPSTVEWDIFENEMEEVAESMPEEVTEARTWKTKCKNVAAVCREISTTAAYIGQLHYDLFVHYNQEAIARRQAERLEAIQPANLTNYLEMATQMDMRTSRMLMGLLKVLMLQNGALQFHYLLQPKPFTGWVTMGMVRDALVQHEADALLARERLGPSTDFTQTYVVSDIPLSLLLEGEDWTFHIPPDDSTFPLSWSRVRIRYLEMNFTGGEEFHRPTTNTGRVYMLLQASRFFQDRLLGEVLHYEAAVPLRYQYAYDLKSGETTTSNRPSDQHDGEFMQMTPFNQWRLRLSASADENRGLAFPTAPPDQLDGSNTQISITFYLTAVRRAATRTSEISSQ

SEQ ID NO: 800 - protein, 882 aa, Adiantum trapeziforme
MATFEEYHPEQYMELYKDFNQVRERLSLEMMEFSEVMVIHRMYLKLEELDVGHLEGAEKVKHLYVFADVVEMRSREDELEPVARLPGSVSVAIICRVLWIRRQGSVTRETLIAFPHLKVHLKMTGARSVNVYRTDHAAETDDGFVFCIDAGSIQRTSDESTTSGILFSLFSYHFVRSPTLDGKNITFSSDTDSSISNLPVVHFPFYTQGWRWSVTTAGILSFAPSSVTSTTTVHATGSLQTYDFTHLTFAPGFWIMRGIPESLLKDDKLLLFMQTSLLISELAELAHPSSETRNAVLTHVEWLSKILINGESKTEGTEFHHEYLALSFRAQYMLKTARSTRSLVVPQLQYDVYGPLINRMAQVAQIYDDAINQLKLFVSQNKILGSYLLEQNKTFAARERDMEVFYAELISQMKIELDSTLLKMDQLGAQMEAQSADMEEAQREMEEGLRRFRNRQVAEAMFSVFRAIGAIALAFLTGGATAPAAMSSARRAVTAAEQAARALERVLDILEGLQAVMEVVAIIKDLVESLQNVGQLVDAPDMPEMPTEADWGIFVNEIEGVAEEMPEEVSEVSAWKTKCKNVAVLGRELMTTAAYISRLQYDIQEHAMLQEIARRHADRLSTIQAADLSSYTEMVMQMDMRTTRIMVSLIKVIYMQNAALMYQCLAPPTQVWQWPSLSMETVWTMLMQNEHVAILGLTRLGPSFDFKRIYVVRDIPVSLLLAGQDWEFEIPVSDHTTFPSTWSRVRIQHLEMKFDAGGGAHQPITDTGKVYILLQGSRAFHDRNQVGRLPLLYEAALPLDYHYAYRLDTGETTLSNLPSTNFLDTYMRMTPFTNWRLRLSASAEENKGLDFPTARQESSIKEEATTQIAITFHVSAIRQISF

SEQ ID NO: 801 - protein, 893 aa, Adiantum trapeziforme
MAAPAATEHGGLDYRELYKDLNQISDSLMLDQMEFSEVMVIHRMYIKLEELDLGHLEGADKVKRLYVFADVVDVEDGGNFIDVGPLARLPGSMTVVILCRVLYVRVLPLAVGGNNNAMRMQLPHMKFRVVEIATGRVQLQRVEQSGDELALCIHARIIQCYIRPSASATIRPPYSLRFLHFAPGRGVPGIVFSSEPRSMVDAQVELFQVYSHLGHVFQAPGPDQIVSINPASLATDWYYVSVSFPDRVVLSSSNAARGELEPAFSLLKPDIPVVVLTDPNVSLLIQTSLLIAELVELAHPSADTTAAVAEHLQWLNSLLLQATAEVKEGTASHDEYLGLLFRAQYLVKMMGRARSLVVPQLQYDVYSNLINRMAQVAESYDQALRQFRLFILQNKILGSYLLAQNRAFAEREKDMEVFHSELLSQRKLELETAIQKMDHLSIQMETQSADMEQAKKDMDEGLRRFQNAAVANAMFAVFGAIAAISLAFLTGGATAPGAVAAAKGAVTAAGALARALERVVEILEGLQAVMELVYLIKELMNSLKEVGQLVEAPEMPELPSEADWGIFVNEIEGVAEQMPTEVSEVSAWKTKCKNVAVLGREMITTATYISQLQYDIKVQDMLQGIARNQADRLLSIQAADLSNYTAMVTEMDMRTTRMLVALIKVVHMQNAALMYECLSLPMHVNAWPVTMETVWSMLVQHEHAAILGLMRLGPSFDFMSTYVAKDIPVSLLLDGEDWELDIPVDDYNTFPSTWSRVRIHHLEMKFVQGNEGSAGNIIHQPITDTGSVYLLLQGSRLFRDRNQSDVLNYEAAMSLDYHYAYRLDTGETTLSNLPSQDFTRTFMRMTPFTTWRLRLSASAQENQGLAFPTATSADSTTQIVITFYISAIRRISL

SEQ ID NO: 802 - protein, 833 aa, Asplenium australasicum
MRCPLNADITNSSRDGRRRLQCAKMAAGDYSVLYQDVNQISIRLEKMDFSEVMAVHRMFVRMDDLDVSSGTGLLSGAEKVKRLYVFADVVELPSKQLRLPGTDLIVILCRIFVTNGRHSTELFLPSMNMSMVAPGTGSIRGVILSPTTVLTTSSDALQFKLQSGSMTSVMRLKDVSVAATLTCNVQAASASMPLTVKTTGTSPGNICVLGMSTAVVVPESAVAVITDANILLGMQVTVLIAELVKIAHNSDVLIAAVTRHVEWLNHLLVQAHAAAPSEDVVALLYRTQGFIKLRNEGLIVPRLQYRMYKDLIDRMVQVAQSYDQDFKQLKLFVEQNKILGSYLLEQNKAFAEKEKDMDAFHSQVIDLRTSELESTIERMDDLSKQMEEQNAAMEQAKADMDAGLIAYQNKQVANAVFAVLGAIASIGLAFATGGATAPGAVASAGAAVTAAGKAAEGLKKVVEILEGLQAVMEVVAVIKELVQSLQEIGQLVDAPEMPDLPSDAEWEIFVNEVEAVAEQMPTEVTEVPAWKAKCKNVAALGREMSTMAAHIAELQFEIQVQEMLREIAKKQADRLSSIKPADLTNYLEMVSEMDMRTTRMLLELIRVLYIQNAALQYEYLQTPAPLNAWPVTMQTVWGLLVQQETAAINGLLQMGAPSDYTQEYAVRDVPVRLLLGGGDWEFELPVRNADFPLTWCRVRIRYVDMRFDAAAEHLPVTSTGEVYMLLQSSRFFEDRAKRENEFISYEGGMGLQYQYAYRLATGDATVTNVPSEEYANTFMRLAPFTRWRLRLSASAPENKGLAFPTATLADATTRIKITFHVSAIRRISTRVAV

SEQ ID NO: 803 - protein, 850 aa, Asplenium australasicum
MASFPDYREIYKNVNQVTRAVASRQGSEVMSIHRMYFKLDELEVERLTEADTVKELVVFADVVGIEGQQVKLPASRTVTIVCHILHVKQEAVKLRFDSFGPVDCDRGWLPGIGEAALILSNSPQVRLSIYAQQVVCNTTRAVVQVAHPVTVSQTVSPHNPSRYAIPGTMKWQVEIASDQPDLSAAERSYELRTERFWDVMEKVWRIDQQEWSLFTHLLQGPVSIPPAILGDSNIILGMQSTLLIAELVLSYQTRADDTVSAANAHLQWLITNLLQVLDDNSLDKETREQLLALQARAELASKLPLDGSHTLIVPRLEYGQYQGLIKSMAAVAEAYNSEFMAVNLFIQQNEILGSYLLQQNKAFAARERDMDTFHGLALARKQQELRTAQESMEDLNAQLTQQTEAMDQAKRDMDAGLKKYRDEQVAKAFFSVLKGVLAIGAAIFTGGAAAGPAVNAGVDAVKGVSSLAGKLDMVIDIMERMEKVMEVLNAVNDLVTALSEINKMVEAPEMPSVPSTYEWDIFENEMEEVAESMPTEVTEARTWKTKCKNVAAVCRAICNTASYIGQLQYDVFVQSNQALIAGKQAERLEAIQPADLTNFLEMATQMDMRTSRMLLNLLKVMTIQNAALLFHFLLPPVPFTGWVTVDMVRNALVKHEADALAARERLGPSTDFVQTYVMSDIPISLLLDGDDWIFTIDPADGSTFPLSWSRVRIQYLEMKFTGGEEFHKPTTSSGRVYILLQASRNFQDRLHGDVLHFEAAVPLRYQYAYDLQSGETTVSNRPSQQHDGEYMQMTPFGQWRLRLSASAVENQGLAFPTAVATDLDSSTTQISITFHLTAVRRIDTRALVEL

SEQ ID NO: 804 - protein, 850 aa, Asplenium nidus; identical to SEQ ID NO: 803

SEQ ID NO: 805 - protein, 886 aa, Athyrium filix-femina
MEYSALYGDVNQVSLRFEKTEFSEVVVVHRMHVRLAELNVTLGDNNILLQGSDRVKRLYVLADVVELPPIFSTSMSLPGTVSVVILCRILYLPYLEDASSASGWAVHAALLRLRVVETHAGFAQVFTIPANDSSAAAPADIGLYIHADRIIYRDDPGRSIPVIEVRVGGDSRFSPFLPGSPEIRLSSVQYVREFSKGQPVAPEDSELQRSDEIELIAPSGSEQQLRAAFGASVGMNLLFHFSSSFDILSLDPVPAALLTDPNIITGMQMNMLIAELVLTAAHNSPQLIKVVTRHVEWLNKMFLQLASPNDDILALLFRVQAYQKMAKQPHPVVPRMRYSRYEGLINQMVQIAQSYDQDLKQLKLFVAQNEILGSYLLEQNKAFAAKEKSMSEFHLQVSDLRRSELNDAIQKMTGLGEEMEVEKEAMDQAYKDMEQGLQEYEKRQIVTAVFAVISAISLCALGFVTGGATVAAVPGAVANAAQAVSAAVSLANKLQKVMGILEIINQVVQTAVAIKEVIELFDNMGQLLEAPEMPEMPSNYDWLIFVNEVEAMAEQLPVEVNERIVWKAKCKNVAVLGQEMCTTGSHIADLQYQIKVEEMLREIAQSQAERLEGISSADLSSYTEMVSQIDMRTTRLLFQLIKVLHIQNAALKYEYLYAADEHLVSWPVSMETVWTMLLQQQRLSLLGWENLVGTNNLPNDDTRTYVVKDIPVEVLLSGRDWPFVIHEEDYTAFPSGWYYVRINHVELKFEQQTAGSTDIVIHQPSTNTGRLYMLLQSSRFFHDRNQGVKMEYEGSRGLSYPYAYNLNTGETTHNNIPSDQFKNIFMQMTPFTTWRLRLSASAEENEGLVFHPPPTSPTSTTQVSITFHVTRIRRIDRSTVHQKHVS

SEQ ID NO: 806 - protein, 849 aa, Athyrium filix-femina
PTCQSPEERRGGEATVRIRGRGGNGGPERAASGVEPSHHIVPSPQDKAKWCSDPTVVLEPGGLLGEAPKQRYNGYRARGHCAADRQVLESDAKEWRACSKRPSNTGNTDIEMEDTVLQIDKYWEVTPKSGELAANGRVVTILASHLVAPVGAQLRVQCPVNVEYQTNVIWPPVFSTIAGTVEWRILPYSAVAAAVHSSAAATTSTFAGTAGLIWTVDEVKKWYPSFKIVLPEVIPLQLLANSNIVLGIEVTTLVSELIMTYQRQATETVAATLHHVEWLDAQLLSASQAQSSGQIQALHFRVQSLLKLPMDDDNAPLVVPPLQYEVYDNLINLMTRAAESYDNAFTQLNLFMQQNEILGNFLLEQNKAFSAKERDMESHHSQLVSLQDAELTATSENIKSMNNELAQQNQAMDKAKADMEAGIKQYRDRLIAEAVFGVLTAIAQVCLAVFTGGASAAGAVETARKLSETAKVLQSVVKHLERLQKIAQVINAVTDFLLNLQSLNQLIELPKMPDLPSEADWDMFENEIVAVAESMPTEISEVPMWKAKCKNVAAVGREIIRTVAYMQQLQYDLAVNKMLQDIAQQQAARLEGLHIQDLDNYMEMATELDMRTNRLLMGLLKVLSLQTGALSYHFLLPPRQLNGWLNMDTVWNALLNNEYDAVKALGSLGSAPTDTMKTYVVRDIPVGLLLEGNDWFFDIPVDDPAFPPPWFRIPIEHVELKFPTDSSQCVHLPTTHSGQVYILLQAARFFSDRLKDEVLHFQATKPVSYQYAYRLDSGETTLSNRPTLSSSTHYMRMTPFTRWRLRLSASASQNQGLAFPTAATEDATTQITINFHLTAIHQIQYRAAQ

SEQ ID NO: 807 - protein, 513 aa, Athyrium filix-femina
TGKHHTENGTIEFTNGDTKRRHGPSQRGHGCRYKSFTARLLNLDDHLASLLHTYGRGIHVPSSGLVYTHFNLQLISCRTMICIKHAGLRRFQNRRVAEAMFAVLGATAAIGLAFVTGGATAPAAVTAAGNAVNAAGQAANALRKVVEILEGLQEVMAMVALIKELVDSLQDIGQLVEAPEMPVLPSEADWLIFENNVEEVAEGMPTEVSEVSAWKTRCKNVAVLGRAMVSTAAYISQLQYDIKVEAMRQEIAKRHAERLLAIQPADLSSYTALLTHMDMRNTRMLLALIRVLHIQNAALMYHSLSLPTHMNAWPVTMDTVWRMLVQHEHAAILGLLRLGPSFDFMRTYVVKDIPVSLLRDGEDCEFNISVQDDTAFPSTWSRVRIHHLEMKFVQEAHVHQPSTHTGKVYILLQGSRIFHDRNEDDVLHYEAAMPLDLHYAYRLDTGETTLSNLPSNDFIRTFIRTTPFTTWRLRLSASAEENKGLDFPTALTVDATTQIAITFYVSAIRRISL

SEQ ID NO: 808 - protein, 882 aa, Athyrium filix-femina
LLDPVLSATEVVDYEALYSEVNEIARALWTLKVRCSEVMAINRMFVRLDTLSVEHLQQPEIVKSLIVVADVVEIEGSSSLTLPGSSLILITCRLLRVKQKNAVLNLAWNLAATNANTSTTSLPRCSIYTQQVDVSNGSTLRIQVKRELKWSNGSPFTQYFGREFSYSSSTKNYSTTSAPAAADYSVKSVGQPPESNLILVNSKKMNILMNDIAWKGFIDLQVAMPSLNDLAHPNVIEGIESNLLIVEMILTYQTNVKDLVTAAKDHVEWINKGILEVVDWPNSEVGLQLKALLGRAQMLLKMPSDGSESLIVPQLEYSGYEKVIQEMAKLAESYNTEFRELNALILNSEVIGQNILNQTKILGAKEREVQNLESLIVLRKQKELDQAIERLEILENQLIRQVDEMEAAKKKLDQGLQAYKNEQIAMAFFSVLGTMMQIAGSARLSSIPEIVVGIGGGISEALSAAEKVKDAIVSNTLQDVANKLRNVERVMEVVNSVKDLYTNATNLEDILNAPQIPDVPSSDWEIMRNDMEEVAAGMPTEVSEVSTWQAKSKNVVAVCEEICVTATSISNTQCDLFVHVEQQEIAKRQAERLNQMQAVDLGDYLEMATQLDMCTMRVLICLLKMLGIQNGALQYQYLLAPQPFIGWPTIENVRMEMLRRVELAVLAKVQLGPPVTLTRNYVIESIPVGLLMSGDDWNFSIDASDNSIFPSTWSQVRIRYLEMKFTGEHHPITETGEVYLLLQASSKFEDRLKTQMFQYEAAAPLTYQYAYNLQTGETTLPNLPHEEGTFLRMTPFTRWRLRLSASAYQNQGLSFPTTTSLDNSISISITFHLTAIVQIQTRLAGGSVYNLFDDDDGDDDQQEGGEQAGGKSGGEEEAGSPI

SEQ ID NO: 809 - protein, 821 aa, Athyrium filix-femina
MAAAVDYESIYKNANEIARVVGTDKISCSEVMACHRMFVRLDTLSVEQLVGSSNVKQLIVFADVVEIQDSSFTLPGSTQIFIACRILDVKANKDIDLTLDWQVVNNAGQTSIPRCAIYAQNIVSSSSTKSGTILLKVKYQRSSSSAPVYFGREFSYSAASTAVVDFSTAQDNLELINRKNWVVNINGMEWSAYVDLQFGLPSVEELAEYNILTGLQSTILISEMILNYRTDLPDTVTAAIAHVQWANLCLLPVVGMTNLEGAYQLPSLLGRAQSLLKLPTDGSQSLIVPRLEYSGYEKLIAQMVTVVESYNNEFVQLILFIQQNQIMGAYLLEQNKAFAAKEKDIAELESMILDRKKQEMDNAFQKMEALNKQLEQQVEDMNQAKEDMDVGIQKYKDEQVAKAFFAVIKGILGVALAIATGGATSAGAVAGAVDAVEKVSQLAKALQKVMDILQGLEELAAILSAIKELLESIEDLNKMVEAPEMPEMPTMADWDIFENEIEAVAEQMPEEVAEVPVWKAKCKNVAAVCREISTTAAYIGQLEYDLFLHGKQQEIAEAQAKRLESITPANLTNYLEMATQLDMRTTRLLVGLLKMLTVQNGALQYHYLLPPKPFTGWPTMDRIRSTLVQNEHNAVLALEQLGFSTDFTRTYVLSDVSVYLLLSGEYWIFNIPVDDPTFPSNWSRVRIVYLEINFTGDEGSTHFPSTNTGEVYFLLQASRMFQDRLEGEYLQYEAATPLQYQYAYVLQTGETTVPNKPSQEEDGRFLRMTPFTSWRLRLSASADENKGLSFPSANALDSTTQISITFYLTAIRKINTREGIE

SEQ ID NO: 810 - protein, 882 aa, Blechnum cartilagineum
MEYSTLYGDVNQVSLRFQKTEFSEVMVVHRMYVRLAELDMTTEPYFEMIAGSEKVKRLYLLADVVELPSSALNMRLPATISVIILCRILYIPDINSPYLACGLHFPLMRLRVVETSEGVGRAFPLPSNDGSGAAASIGLYIHAHRFIYRQDTTTGDSIQPLQLRAIGGSTFSTQVRPDWPETLEVSSLICWLSLTKGPRLTPADSDLQRSDEIELLAPASPDKVNIVFAGLAPGNLLSLYLLVDNTSAFSFFPTPVPNVPADVLTDPSIILGMQMNMLIAELVLAAHNSQQVINVVTKHVEWLNKILLQVASPSDDILALLFRVQAFMKMAKQPRSVVPRLQYHMYSSLINRMVQVAQYYDQEFKQLKLFIAQNEILGSYLLEQNKAFAAKEKDMSVFHSQVVSMRRSELNSAVEMMDKLSLQMEKENEAMNEAKDAMVEAIEEYERKQLANALFAVLGAIASVALAFATGGATAPGAVAAAGAAVTAAGKLAAGLQKVVEILEGLQAVMEIVAAIKDLVESLQNMGQLIDAPEMPELPTNADWQIFVNEVEAVAEQIPTEVAEVPVWKAKCKNVAVLGQEMCTTAAHIGELQYQVMVEEMLQEIAQRQADRLEGISPTDLSSYTEMASQIDMRTTRVLLSLIRVLYIQNAAIKYEHLFAASGQLDSWPVSMETVWTMLLQQENAALLGLLDLGPSNDFTVTYVVKDIPVQLLIDGADWNFEIPVGDFTAFPAGWSRVRIRYVELKFVQQGSGEGNIVIHQPSTNTGLVYILLQSSRFFHDRKREEVMDYEASMGLAYAYAYDLVTGATTLSNIPSEEYANTYMRMTPFNNWRLRLSASAMENQGLVFPTATSPDSTTQIAITFYVTAIRRIDTRIDTQRQE

SEQ ID NO: 811 - protein, 865 aa, Blechnum cartilagineum
WPCVGGSRAQPSVSAGENHVMGNASSTDYEHIYRNANNISRMVATPVCSEVMSVARMFVRLRDLDASRLKNPEVVKELYVVADVVDMEEYNDLTLPGSERIYLICRVFTWRRNQPPPTTVRIRTPWLNLSSCSKLEICPLRHDRQAQTSPAFQCFARAKHSTTSEIAPAVLFLHAAHIYTSNPDTDTSHLNVVLQAQESAQYTLMSADQTPSGEEIFWEVETYPLLPRSDLNSTILSAQEANVLVIELILSYITHATETVKQASLHLEWLNKLLNYALNDTSSASTGSLDDEALDRQLHNLSFQVQFLLNQPPTGAGLIVPRLQYYAYSNLVGTMARIAENYDKEFRQFSLFIEQNDVLGTYLLQQNKAFAEKEREMEVFHLELQQVKKDDLTRALAKLERLEVDMREMNAAMEQAERDMEADLVQYRNRQVARAVFSVIGAIAQLGLAFFTGGATAGGAVAGVANAVSQVTDSAALASLRRISETLEKLVLVTEFLVAMRDLLNAVMDIHQGPPEVPTLPEMVSEAEWAIFENEIEAVAAGMPAEVSSVLTWKTKCKNVAALGREMITLATIIVDLQHDIKVHGLMREMAQNHAQRLKALQPVDLKNYQEMATELDMRTTRMLLGLLEVLSLQNAALRYQYLLPPSPVTIESTSLTMSTAWTLLLQHESASVISLADLGFATDQEVAYIVKGIPVGLLLDGEDWDFPISVRDIAEGAAFPADWSRVRISHVEMKFVKPGAAPADEEETVHQPTTNTGKVHMLLRGEQLFADRKRGESLKYEAAVSMEYQYAYRLDTGETTQSNRPSQEFGDKLFMQMTPFTRWKLRLPTAANENRGLAFPTASAENATTQITISFHVSAIRTIF

SEQ ID NO: 812 - protein, 842 aa, Blechnum cartilagineum
SVFCRYQIHLLCVELRFGSCLLAGSIQHLSMGNSIAAAEARNYEEIYKDANHIGTKSLITAVCSEVMTVCRMYVLLDDLDVKVLERAEEVKVLYVVADVVELRGDAVQLPPSVQLILSCRVLLFSSGNGWPQVAILQGPLVHYNGNYSPVTGNWSATPLLEQDTYRFFLHGQQLLILSGTSGRSSGDVLSEDGKKLQLQSSTAPILPPRWVMEDPHILSGLEASVITSELIVGHMTHAVDLVAEVKLHVEWLLLLLRHALNETMTNAEANHLLRSLFFRVQSLVRMATAAQNNTLVVPRLQHHAYSEYINRLAELARSYDTDFKALTLFIQQNEILGSYLLEQNKAFAEKERDMEVVYTTLNDIKMSELIQALGQLERLGEEMGKMSAEMEQAREDMEEGLKIYRNKQVARAAFSLLNAIAQIGLAIFTAGATTGLAASAVANAGQAITQATEAVQQLRRIFETIEKMLLLAEVLVAMRDLITAMNDGGELGTLPEWPEMPTTAEWEIFENEIEAVAAGMPEEVSETLVWKAKCKNVAAIGREMVTQAMLVSQLEYDIKVHSLLQEVAQNQAARLEAIQPTDLIDYQEMAAQLDMRTSRILLSLLQVLALQNGALTYSYLMPRTSLSARSVSATMSAVWGLLLHQGQATLVALGELGSPSTRSVEYVVKGIPVGLLLDGEDWDFTIPVADTLHFPSTWSRVRISHVEMKFVKTGGTAGRDEELQVHQPTTHTGEVYIVLRSELFFQDRRKGQYLKYEATVPVIYHYAYNLATSETTEDNRPDEEFARVFMRMTPFTRWKLRVSTSARENQGLAFPTAITPDATTQIAIRFYLSAIRDFDWNH

SEQ ID NO: 813 - protein, 845 aa, Blechnum cartilagineum
MGNASSTDYEHIYRNANNISRMVATPVCSEVMSVARMFVRLRDLDASRLKNPEVVKELYVVADVVDMEEYNDLTLPGSERIYLICRVFTWRRNQPPPTTVRIRTPWLNLSSCSKLEICPLRHDRQAQTSPAFQCFARAKHSTTSEIAPAVLFLHAAHIYTSNPDTDTSHLNVVLQAQESAQYTLMSADQTPSGEEIFWEVETYPLLPRSDLNSTILSAQEANVLVIELILSYITHATETVKQASLHLEWLNKLLNYALNDTSSASTGSLDDEALDRQLHNLSFQVQFLLNQPPTGAGLIVPRLQYYAYSNLVGTMARIAENYDKEFRQFSLFIEQNDVLGTYLLQQNKAFAEKEREMEVFHLELQQVKKDDLTRALAKLERLEVDMREMNAAMEQAERDMEADLVQYRNRQVARAVFSVIGAIAQLGLAFFTGGATAGGAVAGVANAVSQVTDSAALASLRRISETLEKLVLVTEFLVAMRDLLNAVMDIHQGPPEVPTLPEMVSEAEWAIFENEIEAVAAGMPAEVSSVLTWKTKCKNVAALGREMITLATIIVDLQHDIKVHGLMREMAQNHAQRLKALQPVDLKNYQEMATELDMRTTRMLLGLLEVLSLQNAALRYQYLLPPSPVTIESTSLTMSTAWTLLLQHESASVISLADLGFATDQEVAYIVKGIPVGLLLDGEDWDFPISVRDIAEGAAFPADWSRVRISHVEMKFVKPGAAPADEEETVHQPTTNTGKVHMLLRGEQLFADRKRGESLKYEAAVSMEYQYAYRLDTGETTQSNRPSQEFGDKLFMQMTPFTRWKLRLPTAANENRGLAFPTASAENATTQITISFHVSAIRTIF

SEQ ID NO: 814 - protein, 812 aa, Blechnum cartilagineum
MGNSIAAAEARNYEEIYKDANHIGTKSLITAVCSEVMTVCRMYVLLDDLDVKVLERAEEVKVLYVVADVVELRGDAVQLPPSVQLILSCRVLLFSSGNGWPQVAILQGPLVHYNGNYSPVTGNWSATPLLEQDTYRFFLHGQQLLILSGTSGRSSGDVLSEDGKKLQLQSSTAPILPPRWVMEDPHILSGLEASVITSELIVGHMTHAVDLVAEVKLHVEWLLLLLRHALNETMTNAEANHLLRSLFFRVQSLVRMATAAQNNTLVVPRLQHHAYSEYINRLAELARSYDTDFKALTLFIQQNEILGSYLLEQNKAFAEKERDMEVVYTTLNDIKMSELIQALGQLERLGEEMGKMSAEMEQAREDMEEGLKIYRNKQVARAAFSLLNAIAQIGLAIFTAGATTGLAASAVANAGQAITQATEAVQQLRRIFETIEKMLLLAEVLVAMRDLITAMNDGGELGTLPEWPEMPTTAEWEIFENEIEAVAAGMPEEVSETLVWKAKCKNVAAIGREMVTQAMLVSQLEYDIKVHSLLQEVAQNQAARLEAIQPTDLIDYQEMAAQLDMRTSRILLSLLQVLALQNGALTYSYLMPRTSLSARSVSATMSAVWGLLLHQGQATLVALGELGSPSTRSVEYVVKGIPVGLLLDGEDWDFTIPVADTLHFPSTWSRVRISHVEMKFVKTGGTAGRDEELQVHQPTTHTGEVYIVLRSELFFQDRRKGQYLKYEATVPVIYHYAYNLATSETTEDNRPDEEFARVFMRMTPFTRWKLRVSTSARENQGLAFPTAITPDATTQIAIRFYLSAIRDFDWNH

SEQ ID NO: 815 - protein, 817 aa, Blechnum cartilagineum
MAAGKTVPMYNHDNQSATIWAEGEMVWAERETSDLLCVNWPYILLDDLGVSRISNPSAIRHVVVIADVVEIDQPLVSLPGSLSITLVCRILRVRQAAGAVLQLRHLQAEWATLSQGQSAQLHLYAQQLVGSLEVHQPVMHTIEPEIPETGLPPIGPPFPPIIASSYMIWAISPYTNASQSKPASLTLHGIVVTHSDEWHNRFKVIVPHSPPLEAFEGVDILLAIEAGLAVAETILTFQTHARERVEAARRHAQWLNQLLQELLDSGRSLKEQILGQLFRTQVLLKLPVDRSQTDAVPRLQYERYGSLINRIAREAESYITEFKKMSLVMQQLDQTARGRQLLAMMETFAANESAMEVEETIYLEDAAVLETRRKIWKRQLEKLQAEMEQANQDMNEGLTGYNDRIDANAMFAILKAVASIGLAMFTGGATVEVAVAEAAVAVSLVSGTNAGRLQNAIKTLQVLVGVIEVLVALNSYFSQGQIEQIQNARAMPQLPSEAEWSSFEDDIEAVAATMPKEASEVPTWKAKCKNMAVFCRELTSTASDLALLRSNMRVHDIRKDIAMIYMERLPQMNPAENFKDYAQLVALLDVQNSRILLRLLDMFVLQNGALGYEYLFPVTRLISGWPKVENLSTMLARSEAEAADYLLTEVGQQTNFSATYAVPEIPVGLLQNHDDWIFTIPINGSIVLSDRWSRIRIHNVDIRFRQGALQPSTVDDQLHILLEAAPTFRDRRKQDILDFKAVVPASYTFAYHLRTGETMPTPEVSDQYPLMKMTPFTQWRLRLSDQNHGLAFPTALSPHDTTVISLTLFFSRIVTDW

SEQ ID NO: 816 - protein, 507 aa, Blechnum Gibbum
VCRALISCIQKKIGKTRSLVVPQLQYDVYSSLINRMAQSAESYDQSLRQFKLFIEQNKILGSYLLQQNKAFADKERDMDNFYSELISQIRKVELQSTILRMDQLSLQMQTQSEDMEKAKDDMDKGLRQFQERQVANAMFATIHALASITLAFVTGGATAPGAVAAAGNAVREAGQLARALEKVVGILDGLQVVMEVVSIMKDLVTSLQDLGQLVEAPEMPDLPLQSDWFIFENSIEEVAAEMPTEVSEVTAWKTKCKNVAVLGRKMITTATYISQLQYDIMVQGMLQEISKSHGDRLASIQAADLQSYTAMVTQMDMRTTRMLVALIKVVYMQNAALMYQSLSPPTYVNAWPVTMETVWSILLQHDHAAVLGLMRLGPSFDFMRTYVVKDIPVSLRRDGEDWEFNIPVKDYTSFPSTWSRVRIHHLEMKFVTEGVNGAAHVHQPITDTGSIYVLLQGSRIFHDRNEGEPIDYEANLPSQEFTKTFMRMTPFTNWRLRLSASAEENKG

SEQ ID NO: 817 - protein, 851 aa, Bolbitis cladorrhizans
MASLPDYYEIYKNVNQVSRPVASRQASEVTSIHRMYFKLNLLEVALLTKADEVKELVVFADVVEMEGGKVELPASRIVTIVCRILSLKREDVELGFKFLGPVECEEGWQVGLNSEMAYIRRTSPQVRLSIYAQEVVHNSTGAILRVTHPVTVRQRVSPHRPSQYTPGTMKWQINISSAHADLSTAQRSHELRTQRFWSEPERTWLINPQEWSPFTFFLPPGLLPLAILGDSNIMLGMQSTLLIAELVLSYQTHAQATVSAAHRHLQWLTTNLVQVLDDDSLENEIREQLLALLARAELASKLPLDGSQNLIVPRLEYGQYRGLISSMAAVAEAYNSEFTAVNLFIQQNEILGSYLLQQNKAFAAREKDMEAFHGLVVERKRQELSSAQETMEELNVQLTQQTEAMDQAKEDMEAGLKKYRDAQAARAFFAVMKGVLEIGAAIFTGGATMGLAVQGGINAVKAVSSLAGKLDMVLQIMEGMEKVMEVLNAIDDLVAAVSEINKMVEAPEMPSMPSTHEWDIFENEIEEVAESMPEEVTEARTWRTKCRNVAAVCRAISTTASYIGQLQYELFVHSNQELIARRQAERLEAIQPADLTNSLEMATQLDMRTSRMLLNLLKVLTLQSGALQFHFLLPPTPFTGWVNMGMVRNALVKHEADAVAAQERLGPSTDYVRTYVMSGIPVSLLLDGDDWIFTINPLDGSTFPLSWSRVRIRYLEMKFTGGEEFHKPTTDSGKVYMLLQASRNFQDRLRREVLHYEAAVPLQYQYAYHLTTGETTVENRPSQQHHGEYMQMTPFGQWRLRLSASAFENRNLAFPTAANTDLDAATTQISITFFVTAVRAVDFRSLDDQDM

SEQ ID NO: 818 - protein, 406 aa, Bolbitis cladorrhizans
WCSRCIFFFTGGATAGAAVAQATRAAQSVIKLTTALKKVMDIVEKLQEVMEVISAINTLWNSLQELNNIVEAPKMPELPTEADWDIYENSIEEVAASMPTEVTEVQAWKCKNVAAVSREMTKTAVYVGQLQQMILVTGLQQDIARKQAERLESMQPQDLSNYQEQATLIDMRTSRILLALLDVLILQNGALRYECLLPPEPITGWPTMDDVRRILITQEGLIVNSHTILGPSYNLEVGYNVSGIPVDLLLDNDEFQFTIPISDRVFPLSYFKVRVRYLEIRFVNDSGNHQPTTLTGEVFISLQASRSFKDREKSGGELQYEAAVPKIYQYAYNLSTGQTTFTTEPAAGTENTYMQMTPFASWRIRLSKSAHENEGLKFPTASQGDTTRIFIRFFLTIIRKVERKHQ

SEQ ID NO: 819 - protein, 895 aa, Campyloneurum angustifolium
SSARAAGVFSSMAVATLRAAEYRELYKDLNQVSEGLILEMMEFSEVMVIHRMYLRMVELDVGHLEGAEKVKHLYVFADVVEMAPASSTVRLPGSVSVSIVCRVLWLPVPVSNIPLIAFPHLKLRANFASGSGNRQFNVYRRTDGGSEVDEGLALCIHAVDIQLTGVPAFAVNSPAFYLFTDPRNLTMPAEGAITFGDPDRQVPVLMFRMYAEAQRLSGVNTGIIRISPPFSNNLRIATTVHAPPTVTLLTIDTHHPHGPGFWILRGIPDSLLKSDQLMLLMQMSLLIAELAELAHPSSETRAAVLEHVEWLSGVLIDGASSTEGTQMHQEYLELLFRAQYLLKTTSSSRSLVVPQLQYALYSPLINRMAQVAQIYDDAVNQFKLFIAQNRILGSYLLEQNKASAERERDLEVFHAELISQMTIELNSTLLKMDQLSLQMEAQTADMEQAEREMEEGLRRFRNRQVARAIFSVFRAIAAVALTVVTGGAAAPAAMNAARGAVSVAGQAARGLQSVLEILEGLQVVMEVVAIIKELVESLQDLGKLVEAPDMPEMPTDADWAIFVNEVEAVAAEMPEEVSEVVTWKTKCKNVAAVGRELMTTAAYISRLQYDIKEHSMLQEIAKRHANRLANTQAANLSSYTEMVIQMEMRTMRIIISLVKVVYVQNAALMYQYLSQPTQMRQTWPVSMETVWRMLTQREHASVLGLIRLGPSFDFERIYVVRDIPVSLLLTGEDWEFEIPVSDETTFPSSWTRVRIKHLEMKFVHDDGSAAAGHHQPITDTGKVYILLQSSRVFHDRDQAGREPLSYEAALPLDYQYAYHLDTGETTLSNLPTTQFINTYMTMTPFTNWRLRLSASALENQGLDFPTARQQGAVNQDATTQIAITFHVSAIRQISF

SEQ ID NO: 820 - protein, 764 aa, Campyloneurum angustifolium
MADYATIYANANQIYRRGVVMEGSRVMSVQRPYVLLDELDMQKLKNANVVQNLVVVADVAEIQASQLSLPGTNQVLIFCRILQVRSANRILITVAAQATQVQIGAQITQNLEVKWPDGSNFLNSWPVWRGNVLSGDYGSNNFDLQTFLTGADILLGIQATLLIMETILTFQTQLRETVEAASQYAEWLSTLVPHERFATQEIKDQLIPLVYRSQTLAKMPLDGSQTTVVPRLRYDSYRNLVNALAQTAAQYDNDFKDLERFIQTQQLLDARLLEWNKNFIAKERDMESFHSQVLYLKQDEMKSALDKVDRLGKQHQELTDEMNTAKEEMDKGIRRYQNAQIASAFFDVVAAIGAVVATFFTGGATAGVAVERATKAAQSVISLTTALKKVMEVVEKLQEVMELLSAMKTLWDSVQEINNITEAPKMPELPTEADWDIYENNVEEVAASMPTEVTEVQAWKYKCKNVAAVSREITRTAVYVGQLQHEILMNTMQQEIANKQAARLEAMQPQDLSNYQEQVTLIDMRTSRVLLALLNVLVLQNGALRYECLLPPEALTSWPTMDAVRRILITQEGLIVNSQSSLGPPRDYEVTYNLSSIPVDLILDNDDFQFTIPTSNLTFPMSYFKVRIRYLDIQFVNEIGSHRPTTLGGEVFISLQASRTFQDRDKSAHELQYEAGVPNTYQYAYNISTGITTLSTKPAVGTENVYMQMTPFSRWRLRLNRSAHENNGLKFPTATSQGDTTRIFIKFYLTVIRKIETRAGTLST

SEQ ID NO: 821 - protein, 940 aa, Campyloneurum angustifolium
SSARAAGVFSSMAVATLRAAEYRELYKDLNQVSEGLILEMMEFSEVMVIHRMYLRMVELDVGHLEGAEKVKHLYVFADVVEMAPASSTVRLPGSVSVSIVCRVLWLPVHISDIPLIAFPHLKLRVILPRGPVGVVFNQFAVFRRTDGGSEVDEGLALCIHAVDIQLTGVPAFAVNSPAFYLFTDPRNLTMPAEGAITFGDLDRQVPVLMFRMYAEAFAVNSPAFYLFTDPRNLTMPAEGAITFGDLDRQVPVLMFRMYAEAQRLSGVNTGIIRISPPFSNNLRIATTVHAPPTVTLLTIDTHHPHGPGFWILRGIPDSLLKSDQLMLLMQMSLLIAELAELAHPSSETRAAVLEHVEWLSGVLIDGASSTEGTQMHQEYLELLFRAQYLLKTTSSSRSLVVPQLQYALYSPLINRMAQVAQIYDDAVNQFKLFIAQNRILGSYLLEQNKASAERERDLEVFHAELISQMTIELNSTLLKMDQLSLQMEAQTADMEQAEREMEEGLRRFRNRQVARAIFSVFRAIAAVALTVVTGGAAAPAAMNAARGAVSVAGQAARGLQSVLEILEGLQVVMEVVAIIKELVESLQDLGKLVEAPDMPEMPTDADWAIFVNEVEAVAAEMPEEVSEVVTWKTKCKNVAAVGRELMTTAAYISRLQYDIKEHSMLQEIAKRHANRLANTQAANLSSYTEMVIQMEMRTMRIIISLVKVVYVQNAALMYQYLSQPTQMRQTWPVSMETVWRMLTQREHASVLGLIRLGPSFDFERIYVVRDIPVSLLLTGEDWEFEIPVSDETTFPSSWTRVRIKHLEMKFVHDDGSAAAGHHQPITDTGKVYILLQSSRVFHDRDQAGREPLSYEAALPLDYQYAYHLDTGETTLSNLPTTQFINTMTPFTNWRLRLSASALENQGLDFPTARQQGAVNQDATTQIAITFHVSAIRQISF

SEQ ID NO: 822 - protein, 861 aa, Campyloneurum angustifolium
MASTTKAAGDWRELYRDMHQVSDRMRFDQLEASEVMVIHRMHIKLSELDMGNLEGGEKVKQLYVFADVIEYDHGVPGASRIVRLLGSVSVVLICREWHMSCQLVANVDHYEITGRDDGLRIVLPHMTLHVVSTYSIPGRTNRIDPQSMQEFPEPCFQVYAEDLSMSFYAPAGGNSWDPALRFPGGGHFQAINNVDLVTHNAFVSFLTSAGIVTETTRHSTLRIYQWDQAGLHNMYNRIGSQPPGTRFIVPRYTEARTDVWAGGNRVIARVEVRLLPAYIVLGLRNLVPVQLLINPNILLTMQSSMLIGELVEATNPSAATREIVLKHVKWLNNLFLQVIEEKKGKDVEEYIALSFRAQYVIKRVGRIHGLVVPQLQYDAYSNLINRMAQVAESYDQAIRQFRLFIQNTENNKILGGFLLEQNQAFAEKEKDMDVFYSELIAQRQIELGNTLQKLERLSVQMQQAHADMQQAEADMEAGLRRFQNRQVAKAVFSVLGAIAAVALTIVTAGAAAPVAIGAAKNAVTVAGSAARGLIRVLEILEGLQAVMEVVRIVKDLFDALQELGQAVELPDMPDMPLQSDWLIFVNEVEAVAEGMPVEVSEVVAWKTKCKNVAVLGQEMTTSAAYISQLQYDIMMQDMLQQIARRQAERLSVLQLSDVTNFTEMVVQMDMRTTRLLVALIRVVDIQNAALMYQYLSTPTPVSTWPVSMDSVWRMLLQHEQHAIQGLMRLGPSVDIVRTYEVKGIPVSLLLDGDDYEFELSAEDRTPFPLSLSRVRIHHMEMKFVQGAHVHMPTTGTGTIYILLQGSRNFHDRNEGKIVHYEGATSLDYHYAYHLDTSETIITNMPSAEFVRTFMRMTPFTN

SEQ ID NO: 823 - protein, 424 aa, Campyloneurum angustifolium
FATGGATAPAAVSAAEAAVTAAGKGAKGLQAVVDILESLQEVMEVVSAIKELVESLEQIGQLVDAPEMPDLPSNADWEIFVNEVEAVAEQMPTEVTEVVAWKAKCKNVAALGREMSKMAAHIAQMQYQIRVQELLREIAQKHADRLSSIKPADLTNYLEMVSEMDMRTTRLLLELIRVLNIQNAALQYQYLKTPAPLNAWPVAMSTVWGLLMQQETEAIAGLLELGAASDFTREYVVKDIPVRLLQEGQDWEFEIPVSSADFPSTWCRVRISHVAMQFDAGAAATHVPTTKSGEVYMLLQSSRFFDDRAKRANEFISYQTGMGLFYQYAYRLTTGEATVTNIPSDESANTFLRLTPFTRWRLRLSSSADENIGLAFPTATSADATTQIKITFHVSAVRRRNIFIADLTSNTDQFSLNVKKSCVP

SEQ ID NO: 824 - protein, 557 aa, Colysis wrightii
DGEATAVCTRFVVPRLQYHMYGSLINRMVQVAQNYDQEFKQLKLFIAQNEILGSYLLQQNKAFAEREKEMSAFHSQVVSMRRSELTTAIETMNQLSLQMETESEAMNEAQENMVEAIQEYERKLLARALFSVIGAIASVALAVATGGATAPGAVAAARGAVTAAGRLAQGLQKVVDILQGLQAVMEVVVAIRDIVESLKNMGQLVEAPEMPEMPTDADWLIFVNEVEAVAEQVPTEVAEVPVWKAKCKNVAVLGQAMCTTAAYMSELQYQITVEEMLQEIAQRQADRLVGISAADLSSYTEMASQIDMRTTRILLELIKMLYIQNAAIKYEYLYDANEKLNSWPVSMETVWTMLLRQENAALLGLLNLGPSNDFTVTYAVKDIPVKLLVDGYDWNFEIAVEDFSIFPSGWSRVRIRYVELKFDQQGTDSSNIVIHQPSTNTGLVYMLLQGSRFLHDRKREEVMDYEASMGAVFAYAYDLNTGATTLSNIPSQQHANTFMQMTPFNAAWRLRLSASAMENQGLVFPTATSPDNTTQISITFYVTAIRRIDHRQEGDEE

SEQ ID NO: 825 - protein, 946 aa, Coniogramme japonica
MDAATDHDYDYESDMHDEESPDLEHLARKVEMVDVADDDDESGMTIVHGESTEQLARGTRSVDFGAEDYRDLNQVSERIRLDQMEFSEVMVIHRMFIRMVELDLGHLEGAEKVKRLYVFADVVEVAEGVAWGLWRNGPLARLPGSIAIVIVCRVLWVSGVLASLGNNSMMLQLPHMKLRVLEITPSKLEIHRVDTSTEAADYPALCIHASVLECSNIRLANDRDRPPFPVRLFGFRPDLRDPNLVFSSVPRSVVDHHPINEFYVFSVIRDVFPRLPLPESVSVQLDSATRGANWYSLQTGSISQVGSVSLNRFPAEEEELEPAFSLMKTKIPAAILTDPNILLTIQTSLLIAELVEVTHPSAETGAAVAKHAEWVNELLLQAASEASGTPSHEEYLALLFRSQYLIKVRGRTRSLVVPQLQYDVYSNLINRMAQVAESFDQSLRQVKLFILQNKILGSYLLEQNRALAEKERDMDVFHSELISQSKLELENTIQKMEQLSSQMETQREGMDQAKEDMDAGLRSFQNRRVAEAMFAVISATAAIGLAFVTGGATAPAAVTAAGNAVRAAGQAANALQRVVEILEGLQEVMAMVALIKELVDSLQDIGQLVEAPEMPVLPSEAEWFIFENNVEEVAEGMPTEVSEVSSWKTRCKNVAVLGRAMVSTAAYISQLQYDIKVEAMRQEISKRHSERLLAIQPADLSSYTSLLTHMDMRNTRMLLALIRVLHIQNAALMYHSLSLPTHMNAWPVTMDTVWSMLVQHEHAAILGLLRLGPSFDFMRTYVVKDIPVSLLRDGEDCEFNISVQDHSAFPSTWSRVRIHHLEMKFVQEAHVHQPSTHTGKVYILLQGSRIFHDRNEDDVLHYEAAMPLDLHYAYRLDTGETTLSNLPSNDFIRTFIRTTPFTTWRLRLSASAEENEGLDFPTALTADATTQIAITFYVSAIRRISL

SEQ ID NO: 826 - protein, 1004 aa, Coniogramme japonica
MSGTPARLSLPALIISLSLTLTYRQVPDMDAATDHDYDYESDMHDDLVLRRLKLMHQVPDMDAATDHDYDYESDMHDEESPDLEHLARKVEMVDVADDDDESGMTIVHGESTEQLARGTRSVDFGAEDYRDLNQVSERIRLDQMEFSEVMVIHRMHIKLSELDLGHLEGAEKVKHLYVFADVVEVDEGESGELPVRFPGSMSVFILCRIWHVRAFVGLDGRNHHRVLRLPHMTLHLYRSPTLTRLHRLDPTTLQDVAEPALSIYADVVQVSLQNRPATVHSIAPFYFESSDSRVLLSRPNQQRLLQRTSLFWVRLFRNGIPNPGLPAITNEAFSVRIEDRQVLSGRGPFPTTRYSPAFPRGLLTPDIPVIFLTDSHILPALQTSVLIAELVELGRPSQATIDAVASHLRWLNKLLLKVIQETKGSTEFRQDEYLELSFRAQYLIKKMGNIRSLVVPQLQYSVYSPLINRMAQVAESYDQSLTQFRLFIQQNRILGSFLLEQNRAFAQRERDMDAFHSELISERETELENTLDKMLQLHSQMERESAEMERARERMEEALIDFQRRTILRAVFSIFAAVAGLALAFVTAGAAAPAAVAGASAAVSAVSNTVTVAAALQRIVGMLEILETVMEVVRLIKEIIDNMDLVDQLADAPEMPEMPSDHQWLIFMNDVEAVAAEIPPGVSGVSAWKARCRNVAVLGREMITTAGFISQLQYEIKVQTMLQEIAKRQAERLLAIQLPSLTNFTEMVTQMDMRTTRILVTLIKVVEVQNAALMYQYLSEPTLVNAWPVTMDTLWRILVQHEHSAIRGLIRLGPSFDINRNYVVRGIPVDLLMHGEDWQFEIPVLPNDDDDDEMDAIFPSSWSRVRIHHLEMKFVKAPHVHQPTTRTGSIYILLQGSRIFEDRNQGARVHYEAATSLDYHYAYRLDTGETTLSNFPSMEFTQTFMRMTPFTTWRLRLSASARENAGLTFPTAITADSTDQLIDPDATTEIAITFSISAIRHISF

SEQ ID NO: 827 - protein, 774 aa, Coniogramme japonica
SAVPRCSIHAQQVVVSRTAPPPLLSSIGSLIIRVKRDLQRSDKSPFTQYIVRYFSYSGANTVVTAPVSPTRPPSFHWLQIVSTQRRVTVMFNEIKWNKWKADIDFQVALPLLDDLTDIHVIKGIESTLLIVELILTYRSDRMDTVAAALEHLQWINKSLVEVVQLPNSERVLELKALAARAQMLLKLPIDGSHSLKVPQLQYGQYNDVIDQMAVVAEAYNSEFRALDLFIQGNQIIGDYMLTQMKLMSTKEKDVADLESLMVLRKEQELKDAMERLQFSEEQLLKQVEEMTEAQRQMEQGVMEYVNRLTANAFFAVLGASMNIVGSLMSGSIGGVVGGIGGTISEARDIISMMDDAVASRSLLNVANGLIEVERVFEVVNAIHELYKTASSLEDLLVAEEMPIIPASEWDIMENNMEAVAATMPTDVSEALVWKAKCKNVMAVCREICTSAVTLTELQYDLFVHARKQEIAQRHADRLAEFTAADLSEYMEMASQVDTQNMRVLISLLSMLAVQNGALQYNYLMPPEPFTGWPTVESVRSALVRRKHQAVIRKASMGASHELPAHTYVLQSVPVGLLLSGEDYIFTIDPSGSDFESTWSRVRILHLEIKFTGEHQPRGGPREQAYFLLQPSSHFQDRWGNQVFHYEAVVPLIYQYAYNLNTGQTTLPNIPHEEATFLRMTPFTRWRLRLSASASQNQGISFPTATAPDSTTQITITFYVSAHVRPQTFNPLDHAEEPDIPWGEDQQQRSTEPEHEEPERGEEQEQPDIIPQEPV

SEQ ID NO: 828 - protein, 641 aa, Coniogramme japonica
SAVPRCSIHAQQVVVSRTAPPPLLSSIGSLIIRVKRDLQRSDKSPFTQYIVRYFSYSGANTVVTAPVSPTRPPSFHWLQIVSTQRRVTVMFNEIKWKADIDFQVALPLLDDLTDIHVIKGIESTLLIVELILTYRSDRMDTVAAALEHLQWINKSLVEVVQLPNSERVLELKALAARAQMLLKLPIDGSHSLKVPQLQYGQYNDVIDQMAVVAEAYNSEFRALDLFIQGNQIIGDYMLTQMKLMSTKEKDVADLESLMVLRKEQELKDAMERLQFSEEQLLKQVEEMTEAQRQMEQGVMEYVNRLTANAFFAVLGASMNIVGSLMSGSIGGVVGGIGGTISEARDIISMMDDAVASRSLLNVANGLIEVERVFEVVNAIHELYKTASSLEDLLVAEEMPIIPASEWDIMENNMEAVAATMPTDVSEALVWKAKCKNVIAVCRELCSTAVSMSELQYDLFVHASMQEIAQRQAERLEEFRASDLGEVTEMATQVDMQTMRVLLSLLSTLAIQNGALQYNYLMVSEPFTGWPTVENVRSSLVRRQQQAIWDRPPSCRPTRTCWSRYRWACFSLGRITCLLSTQAALISRIPGLASASSTLRSSSLEDTCHAQLATKPISYCKRRPNSRIDGGRRSSITRQLLP

SEQ ID NO: 829 - protein, 882 aa, Davallia fejeensis
MEYSSLYGDVNQVSLRFQKTEFSEDMVVHRMHVRLEELDISVGPFNNETIEGSENVKRLYVLADVVELPSTPRNTRLPATISAIILCRVLYIPDIRFAHPTTCGLDFPFMRLRVVETSQGVGQAFALPSDDDGTGSTGAAASNIGLYILADRFIYRQATSTANFVQPLRLMTYGTSSFSTTVRPDWPEALNISPLTYWLTLSKGPPLTSSDSDLQRSDEIELLARPPPPDRIQVVFRPLAPGNMGGMALLLENSSSAFSFFPAPAPAVSADVLTDPSIILGMQLNMLIAELVLAAHNSPQVIKVVTKHVEWLNKILLQVASPSDDILALLFRVQAFMKMAKRPRFVVPRLQYHMYSSLINRMVQVAQSYDQEFRQLRLFIAQNEILGSYLLEQNKAFAEKEKEMSVFHSQVVSMRRSELNSTIEVMDRLSSQMESESEAMDKAKDNMVEAIQEYERKQLANALFAVLGAIASVALAFATGGATAPAAVAAAGAAVNAAGRLAQGLQKVVEILEGLQAVMEIVAAIRDLVESLENMGQLVAAPEMPEMPTNADWLIFVNEVEAVAEQIPTEVTEVSVWKAKCKNVAVLGQEMCTTAAHISELQYQITVDQADRLVGISIADLSSYTEMASQIDMRTTRMLLELIKMLYIQNAAIRFEYLYAASEQLNSWPVSMQSVWTMLLQQESASLLGLLDLGPSNDFTVTYVVKDIPVKLLVDGYDWHFEIPVDDFASFPAGWSRVRIRYVELTFDQQGTDQSNIVIHQPSTNTGLVYMLLQGSRFLHDRKRGELMHYEASMGLSYAYAYDLNTGATTLTNIPSEAHANTFMQTTPFTAWRLRLSASAMENQGLVFPTATSPDDTTQISITFYVTAIRRIDTRQSGDHVE

SEQ ID NO: 830 - protein, 855 aa, Davallia fejeensis
MERAIPDYSHMYRELNQVSERMKIEEMELSEVMVIHRMFIKLPDLSIAHLEGADKVKRLYVFADVVEFGSVGQTSSLPGSIMVVIMCRVLTWHWADALATPYQLDFPHMRLHAIVRSENGPLLHYHRRNSDSVHDDYPVITVSAHVIQFSGSRPTHFFGIGPLRDPSMIISSVVHQPNIVERPSRGSFCNVGLSSGSSIVTNPGRVQFRIILNWDVDRSYTVTRAPQGFSLLQRDLPDLLLIDPNILLCMQTSMLVAELVEFSHPSSDLHAAVSEHVAWLNTHLLQASTKAQGTSSHDDYLALIFLAQYLLKGMGRARSFVVPQLQYDVYRNLINQMARVAESYDQSLRQLQLFVAQNKILGRYLLEQNRAFAAKERDMEVFHSELIANKELELQNTMFKMEQLSLQMETQIADMDQAREDMDAGLRRFRNRQVANAMFAVFRAIGAIALTVVTAGAAAPAAMAAAKGAVTIAGQAARGLVRVLEILDNLQAAMEVFKIIKDLVESLREVGQLVDAPDMPDMPTEADWSIFVNEIEGVAEEMPEEVSEVSAWKTSCKNVAAVGRELMTTSAYISQLQYDIKVQALLQDIANRQAERLSSIQAADLSSFTEMVTQMDMRTTRILIELIKVLDMQNAALMYQSLTPPAPMNAWPVTMETVWGMLVQHEHAAVFGLMRLGPAFDFKRTFIVKEIPVDLLLHGEDWQFEIPVNELTVFPSTWSQVRIHHLEMKFVGTHDIEGAHQPTSESGEVYILLQGSRVFHDRNKSEPLHYEAAVPLDYHYAYHLETGETTLSNSPSNDFIRTFMRMTPFTTWRLRVSASAKENQGLAFPTTTVGAGDTTQIAVTFYVSAIREISL

SEQ ID NO: 831 - protein, 867 aa, Davallia fejeensis
MELIEKERTNKMVYTSAMVDYERLYREVNQTARAVGINKVRCGEMMAIHRMFVKLDSLTVENLDQYEVVKGLVVIADVVEIEGSSELTLPGSEYVLIFCRILHVKTDKEVVLNLNWKLSHNPPPSPSPRCSFYAQEIVASPNATLLIQVKHNDKWSNDSTFTQCIGRRFSYSSTNSSISSTPPSNVSSLGNPPTSNLILVEFERMNILYNDTNWRAFIRFQVSIPSSYDLLFPNVVEGFESTLLIVEMILSYQTDNRDLVHAAQQHLHWVDKLLLEVVSFGGDAHVQTQNKALLSRAQMLLKMPLDGSQSLVVPQLEYTGYEQVIRDMANMADAYNREFQALNQFIISNQITGQYMLNQNKALAERENDIQALESLIVLRKEQELDQAMRRLELLENNVRRQANEMDAAKDRLDQAIQDASHKRFATAYFALLGATFQIVGSLNVSNVPGIVVGIGGGINDLVNAANEVNDLTQRNMLRDVANKLGNVERVVEVVNAVQDLYKNATSLEDILNAPEMPIILASEWDSMENDVVELAAFMPTEVSIEVSTWTAKCKNVMSTSREICTTAVSISQIQCDLFVHAKQLEIAQRHAERLEEMQAVDLGDFLEMAMQMDMRTTRFLINLFRKLAIQNGALQYHYLLPPRPFTSWPTIDNVRRELVLRAEMSVLAQEQLGPPIRLTRTYAVHSIPVGLLLSGDDWNFLIDPSDDSTFPSNWSQVRIRYLEMEVTGEHKPITQSGEVYLLLQASSMFQDRLRGQIFHYEAAAPLSYAYAYNLATGETTLPNQPHEEGRFLRMTPFTRWRLRLSATAPENQGLSFPTATDLASSTQISITFYVTAIVGIHNLSSTVLSLLDYNEHGEEDHEEAKV

SEQ ID NO: 832 - protein, 340 aa, Didymochlaena truncatula
MPTEADWAIFVNEIEGVAAGMPEEVSEVSAWTTKCKNVAVLGRELTTTAAYISRLQYDITEHAMLQEIAQRHANRLSTIQAADLSSYMEMVMQMEMRTTRIMVSLIKVISIQNAALMYQCLAPPKELVRQWPLRMETIWTMLMQNEHVAILGLIRLGPSFDFKRTYVVRDIPVSLLLAGEDWEFEIPVSDHTTIPSTWSRVRIQHLEMKFVDDDATGAHQPITDTGKVYILLQGSRAFHDRSQLGLLPLLYEAALPLDYHYAYRLHTGETTLSNLPSTNFMDTFMRMTPFTNWRLRLSASAEENQGLDFPTARQQGTINEAATTQIAITFHVSAIRQISF

SEQ ID NO: 833 - protein, 863 aa, Dryopteris erythrosora
MEYSDLYGDVNQVSLRFQNTEFSEVMVVHRMHVRLDELHIPLTALEGSKKVKRLYVLADVVELPSSRPSLLLDLPATISVIILCRVLYAPATLTFLNFSFLQLRLRVVETSEGVAQTFAVPSEDDGDGSNIGVYIHADRLISRQLDTTTNNRLLLVMEVVGAGSTFSSTVRPNWPDTINVSVLGWELLLSRGPALTPSDSDLQRSDEIELLANPPHFPSELHGSVRFESWNPAVNTMHLFLQFQNSSTFSFFPVPAPPHVPADVLTHPSIILGMQMNMLIAELVLAAHNSPPVVNVVTKHVEWLNKILLQVASPTDDILALLFRVQAFMKMAKQPRFVVPRLQYHMYSSLINRMVQVAQNYDQEFRQLRLFIAQNEILGSFLLEQNRAFAEKEKEMSVFYSQVVSMRRSELNSGIETMDRLSLQMGTESEAMDEAKDDMVEAIQEYERKQLANALFAVLGAIASVALAFATGGATAPGALAQGLQKVVEILEGLQAVMEIVAAIRDLVESLENMGQLVAAPEMPEMPTNADWLIFVNEVEAVAEQIPTEVTEVSVWKAKCKNVAVLGQEMCTTAAHISELQYQITVEEMLQEIAQRQADRLVGISIADLSSYTEMASQIDMRTTRMLLELIKMLYIQNAAIKYEHLFAASGQLNSWPVSMQTVWSMLLQQESAALLGLLDLGPSNDFIVPHVVKDIPVKLLVDGNDWHFEIPVEDFAIFPAGWSRVRIRYVELKFEQQGTIHQPSTNTGLVYMLLQGSRFLHDRKREEVMEYEASMGVSYAYAYDLRTGATTLTNIPSEASANTFMQMTPFTAWRLRLSASAMENQGLVFPTATSPDDTTQISITFYVTAIRRIDTRQQGDVE

SEQ ID NO: 834 - protein, 818 aa, Elaphoglossum
RLLKSNRTSTCCAPTGVWELLTCWRQSILSMAKDYAEIYKGTSQLDRSVATPVCSEVMTVARMYLLLDDLDVSLLKQPEVVKTLYVFADVIEMKKRVTLPGLEAFIVCRVFLTFTTTEETRSIWPELQTGVIVCRVFLTFNTTETRSIWPDLETDGPGWVPPDPSDPRPPAEPAPVQVPVYPILTDGTILHPLTAANAVPRSTLENSNMLLAMQATLLISEVILSFMTHATDLFTEATLHVEFLNNLLVKGMEDTTSGSGEEGRHQLRTLLFRVESLLKMQAPGLLVPRLHYNSYRNLINRMADMAMSYDTEFKQLNLYIQQNEVLGTYLLEQNKALAEKEKEMEEVHSELQEYKTTELRDVLATLDRLGGQMSEMSAEMDQAQEDMEKGLIVYQNRQTARAVFSVLNAIAQIGLAFLTGGATAPLAVNAAANAAQSASKLLKVVETLERLLLTVELLVALRDLFDAINNLGSEMTGTPIKPEDMPSAAEWTIFENEIEAVAAEMPVEVSEVLAWKAKCKNMAALGRELVNQTALVSQLQYEINLHSLQREVAQNHADRLLAIQPVDLSNYQEMAIQLEMRTTRILLGLLQVLLLQNGAIHHYYLQAPTPLSSTSVTMTAVRTLLVRQEATAVISLAELGTPSDRNFTYSVKGIPTKVLLDGEDWDFAVPVTDRDVFASDWNRVRILHVELKFVTADSGEVHLPTTDTGEVYMLLRSERFFEDRKNDELLQYEATLPVQYQYAYNLKTGETTEDNRPSEAFANLFMQITPFTRWKLRLSASASENRGLAFPTAVAADATTQIDIRFFVSAIRRIDWKM

SEQ ID NO: 835 - protein, 788 aa, Elaphoglossum
MAKDYAEIYKGTSQLDRSVATPVCSEVMTVARMYLLLDDLDVSLLKQPEVVKTLYVFADVIEMKKRVTLPGLEAFIVCRVFLTFTTTEETRSIWPELQTGVIVCRVFLTFNTTETRSIWPDLETDGPGWVPPDPSDPRPPAEPAPVQVPVYPILTDGTILHPLTAANAVPRSTLENSNMLLAMQATLLISEVILSFMTHATDLFTEATLHVEFLNNLLVKGMEDTTSGSGEEGRHQLRTLLFRVESLLKMQAPGLLVPRLHYNSYRNLINRMADMAMSYDTEFKQLNLYIQQNEVLGTYLLEQNKALAEKEKEMEEVHSELQEYKTTELRDVLATLDRLGGQMSEMSAEMDQAQEDMEKGLIVYQNRQTARAVFSVLNAIAQIGLAFLTGGATAPLAVNAAANAAQSASKLLKVVETLERLLLTVELLVALRDLFDAINNLGSEMTGTPIKPEDMPSAAEWTIFENEIEAVAAEMPVEVSEVLAWKAKCKNMAALGRELVNQTALVSQLQYEINLHSLQREVAQNHADRLLAIQPVDLSNYQEMAIQLEMRTTRILLGLLQVLLLQNGAIHHYYLQAPTPLSSTSVTMTAVRTLLVRQEATAVISLAELGTPSDRNFTYSVKGIPTKVLLDGEDWDFAVPVTDRDVFASDWNRVRILHVELKFVTADSGEVHLPTTDTGEVYMLLRSERFFEDRKNDELLQYEATLPVQYQYAYNLKTGETTEDNRPSEAFANLFMQITPFTRWKLRLSASASENRGLAFPTAVAADATTQIDIRFFVSAIRRIDWKM

SEQ ID NO: 836 - protein, 591 aa, Elaphoglossum
DNRDIAWKHLHSWPEYSCRCSTSMPLAVKTTGTSPGNICILGLSTAAIVPESAVAVITDANILLGMQVTVLIAELVKTAHNSDIVIDAITRHVEWLNHLLVQAHSTAPSEDVVALLYRTQGVLKMPREGLVVPRLQYHMYKNLIDRMVQVARSYDQDFRQLRLFVEQNRILGSYLLEQNRAFAAKEQDMDAFHTQVIALRTTELNNTIETMDLLSIQMEAENEAMEQARADMEAGLVQYQNRQVANALFSVLTAIASIALAFATGGATAPGAVSAAGAAVTAAGQAAAGLRRVVEILEGLQVVMEVVAAIKELVQSLQEIGNLVDAPAMPDLPVMEVVATIKELVQSLQEIGNLVDAPAMPDLPSNADWDIFVNEVEAVAEQMPTEVSEVPAWKAKCKNVAALGREMSTMAAHIAELQFEIQVQEMLRDIAQKQAERLLSIQPADLTNYLEMVSQMDMRTTRMVMELVRVLRIQNAALQYEYLQTPAPLNAWPVTMETVWGLLIQQETAAILGLLQLGPPSDFRREFEVKDIPVSLLLEGQDWEFELPVMNADFPTTWCRVRIDHVEMHFDSAAAHLPTTNTGKVYMLHCQ

SEQ ID NO: 837 - protein, 1344 aa, Polystichum polyblepharum
MGDEGDVKEDEYDYEAAYKEIDDCIRKDECFGRVENCGGLWGQTMVVRSMYLRLDDIDARHVVRPETVETLLVYADVVDVESDWVDLPGTKLVFIHCRLMRLKSRGGSTTVHFKYMMATAREGSPITYLYPHQLIVAGGDQASGLILRVSYRIQVLKKQVELVRTCHLNTFKSITVQTLKTPGFTYNSDESDFEAARTRIDLFEADYSFSEDLCNKIRYLLTTSLSSLQNTLPKICVIPPVACLHLEWLTHDCVLLWLLIREQNLKNLREKKNLVITPELKNSLLITIIKLSRMGEVAFTELVREGLIDDKHKGDLKFIFQTMHNLHRILKIQRTRTIGEVANYDEVFNSVNQIKEVVATRECSEVMVIQQMYLLLDDINVGLLQNPHNVKKLVVFADVIEIRSQNLHIPSSREVIIICRILRTKRANKLTFPYLSYNSYPLSLYVSPFGLLQQDSTSKVCIYTKELIMNDPANLLRVYSTSMELPNLVEVLGDPYVLPLIVDSLQSVENIMTYLKRTTVIATIVQDHLQWLISLLNQMMFAKSGNINITGLWRQWAENLSSHIEDATQHTLSTSEVVDYAEVYKNVNADYTELYKSVNQMRRVFVGGECPEVVIVHRMYLRLDELAASLFKKPYAIKELYVYADVVELGSQNLQIPGSTKIIIICRILRVKGPHKLTFPYLSHDPNSLPLSLFVSMINLMDWTSTLGVCIYAQHLIMNNPFNPTKCSSTSFELSIPVLIQLGNPNVLPLIEGDLQSAELILTNQTSVTATVTATKDHLQWLITILNEAKDITNLSKVSFRDLLNHAQSILRKSNESSILLVPSLRYDKYSDLIKTMANAALDYDNEFKQLDLFNKQIQISGDYLWVQNKKLAEKERDVALFHLSLLEHKKKELNAAKENSSKLKEQLKSLKKELVKAQQDLDAGLKRYRDELKMKAILSVTFLVINLALVFSTFGGNINGYKEVQESIEECKSTKKILVETWKVIKTLQEVALCLGENIGNSTKRKLHDTFDMPKMPSKADWYKFENEIVEMVENLPSKMSEVFAWKAKCKNVAIVSRELITTMAYIRRLEQEIWVEDREVEIATKQAERLEKMKVVGLNNYEDMVFQLDIRTMRILTQLLRVLNLQNGALLYHYLLQPKPIVKRWMNMGEVTSALRSHKELEIEGLEQMGTPTDKESVYKVCNIPVDLLMDGQDWIFTIPTDDFLVFPRSWSHVRIKYVEIRFSPTHHIPSTTSGQVYFLLQASRMFQDRKKEQVLDYEAAVPLEYQFAYDLKSSKTTESNKPTHEYEGSFMRMTPFTQWRLRLSSSAEENQGMSFPTAKEPDSTTEISITFYLTSIREKST

SEQ ID NO: 838 - protein, 1031 aa, Cyrtomium falcatum
MCVQEVIFDTMHNLHRILKIERTRTIGEVENYDEVFNSMNQVREVVSTTECSEVMVVQQMYLLLDDLNVGLLQNPHKVKKLIVFADVIEIGSQNLHIPSSAKVTIICRILRTKRPKKLNFPYLCHNSSPLSLYVSPFGLLQQGSTSKVCIYTKELIMNDPFNPLRVYSTSMELPNLVEVLGDPYVLPLIVDSLQSIYYILTCQKSTAIIATTTQDHLQWLISLLNQMFAKSGNNIIDFWRQWAEYLSKHIEDVTQHTLITSRMVDYAQVYKNVNADYAEVYKSVNQMRRVVAMQGRECPEVVTMHRMYFLLDELNASLFKNPDAIKELYVYADVVELGSQNLQIPGSTQIIIICRILRVKGPHKLTFPYLSHDHDISPLSLFVSTVTLFDWPSTLGVCIYAQHLIMNNPFNPFTFASTCFQLSIPAELLGNSNVLPLIEADLQSAELILTYQTSVTTTITATKDHLQWLITLLTKVKDDADLNEVSFQDLLNHAQSILRKSYGSTTLLVPSLRYDKYSDLIKTMANAASAYDSEFKQLDLFNKQIQIAGDYLWVQNKKLAEKERDVTLFHSSLLEHKKKELNAANENSEKLKKQLESLKTELMEAQQDLDAGLKRYKDDLKMKSILSMVFLVINLALVFTTFGANINGYKEVQESIEGCKEIKKVLVETWKVIKTLHELTLCLFEKIGTSTKRKFHDAFDMSKLPSIADWYKFENEIVAVVENLPSKVSEVFVWKAKYKNVAVVSRELITTMAYIRRLEHEIWVEGREVEIARKQAERLEKMKVVGLKNHEEMALQLDMQTMRILTHLIRVLNLQNGALLYHYLLQPRPIVERWVNMGEVTSALRSHKELELEGLEQMGTPTDKESVYKVGNIPVDLLTTGQDWIFTIPIDDFSAFPQSWSHVRIKYVEIRFSPTHHIPCTTSGQVYFLLQASRMFKDRKKGAVLDYEAAIPLEYQFAYDLKSGKTTESNKPTHEYEGSFMRMTPFTQWRLRLSTSAEENQGLSFPTSKETDSTTEISITFYLTSIREKST

SEQ ID NO: 839 - protein, 1348 aa, Matteuccia struthiopteris
MGDKYVGDKEEEYDYEAAYKEIDDCLRKDESYGRVENYGGLWGETMVVRSMYLRLDDIDARHLVSPERVKTLLVYADVVDVESQWVDLPGTCILIVCRLMRMKARGGSTTLNFKYVMASGSDGHVFTGGLFPPQQLIVAGRGEASGQEQQLVVRYSFRIQVLRKEVDVVRTILWTPYTDITSLRTTRQTLKKPGFTYKSDESDFEEAQTRVELLASEAKGEDLSEVCTLGHDLSKSTCNKVRFLLRTSLSSLQNALPKICVIPPAACLHLEWLTHDCLVLWALIRDQSDRQELRGMQSLIHIATLMRNMGGLGAFTGLIGYKHKPDLKVIFETMHNLHRILKIERTRIIGEVANYDEVFNSMNQIREVVATSEVMVMQRMYLLLDDLNVGILQKTKNVQTLVIFADVIEIGSQNVQIPGSTKVTIICRILRSKRPKMITFPYLCHNSSPLSLYVSPFGLLQQDSTSKVCIYAKELIMNDPFNPLRVYSTSVELSNHVEVLGNPDVLPLIVKSLQSVDYILTYQKSTTIIATTTQDHLQWLISLLNQVMSAKIGNSVIDFWRQWAEDRSKYIEDVAEHTLSTSKVVDYAEVYKTVNADYAEVYRSVNQMRTVVFNTDIECSEVMIVHRMYFLLDELNASLFKSPDVVKELYVYADVVELGSQNLQIPGSTKIIIICRLLRVKGPRTITFPYLSHDHDLSPLSLFVSIVNWPSTLGVCIYAQHLIMNNPFNPTTCSSTSFQLPIPVEILSNPNVLPLIEADLQSAELILTYQTSVTETITATKDHLQWLITILNEAKDHTNINEVSFRDLLNHAQSIFRKSNGSTILLVPSLRYDKYSDLIKSMANAASAYDSEFKQLDLSNKQIQIVGDYLWVQNKKLAEKERDVARFHSSLLEDKNKELNAANENSEKLKEQLESLKIELMKAQQDLDAGLERHKDKLKMKAIQSVVFLLINLALAFTTLGVDIKAYAEVQKSLKKYKDTKKILEDTWSLINMVARSLCVCEKIETSTKIQLHDTFDMSKMPSKAHWYKFENEIVAVVENLPSEVSEVFVWKAKCKNVAVLSRELITTMAYIRQLEHEIWVEKREVEIARKQAKRLEKMKVVGLKNYEEMALQLDMRTMRILTHLLRLLSLQNGALLYHYLLQPRPIVETWMRMCEVTSALRSHKELELEGLQEMGAPTDKESVYKVGNIPVALLMTGQDWIFTIPTDDFKVFPRSWSHVRIKYVEIRFSPEHHTPSTTSGQVYFLLQASRMFQDRKKGQVLDYEAAVPLEYQFAYDLKSGRTTESNKPSHEYEGSFMRMTPFTQWRLRLSTSAEENRGLSFSTAKETDNTTEISITFYLTAIREKNT

SEQ ID NO: 840 - protein, 1082 aa, Thelypteris noveboracensis
MGENVEDNEYHYDYEAAYKEIDDLISTVVKRECSEEIMVVHCMYLRLDDVDAGHLVNPEKVKIMLVYADVVDVESEWLEFSGRFEVYIMCRMLRVKARHGSTLDFKYFTPIGASMKTLQLPAWTMNEQLHIWAQQLMGGENEQELAIRAGFWAYEENTRVQVVGELRVKPYGRECTEDESVTRTCQTLQKPGFTYRPDESDFQEAQSEVNDLLCNRPRWFKECFHLVSPEPIAISWSDELCETIEGALSSLELALSRACIIPSAAFLHLQWLVRHLAQMGSTATMSSIASANINCLESLLSRAKTLLNAITYLQAHTRIIGEVVYAEVYKNMRRAFSTRECSEVMTMQRMYFLLDDLDMGLFKNPHVVKELIVYADIVEVGSNTLWIPGSTRVIIMCRLLSLKRSQPCILNFPHMPHDDASSYLSVYVSPAMLLNQPPATLGVYIYAQELIISNPINPTTCFSTSFQSSIPVEILGDCNVLPLIQGALHTLTYQLSATANVKTTQDHIQWLIIHLAQVENKANLHESSLNDMRDLLLHAQLLLKMSSESKSVIVPSLRYEKYSKLIERMATAASDYNSQFLQVDYFIRQNQISGDYLLQQNKIFMEKERDVEYFHSLLTDCKKVEFDAAMHKMKALKELLTTQEVEMNQAKKDMEAGLKRYQDSKIADAVFSLFGAVFEVGLAASALANAGTTLRRFKDVVEKMKKLKDTLEEIVKMVKMVENICSSFDALMDVYTLDFQKPQQIGKSLMPEMPKMPSKADWEIFENELMQVAESMPSEVSEVPIWKAKCKNVAAVFRELITIVSYMKQLEFDILVEGMEGKIAAKQMERLEHMTLADLKNYEDMAMQLEMRTSRILSRLLKALNVQSGALLYHYLLRPKPITNWMDMDAVTNALLSYEELAVEGLEQLGTPTDYRREYVVADIPVALLMDGQDWTFTIPIDDYLVFPAYWSAVRIKYVEMRFDEGHHLPSTNSGQVYCLLQASRMFQDRKRGEVLDYEAAIPLDYQFAYQLETGCPTVTNKPTHEYMGTFMRMTPFTQWRLRLSASARENHGLTFSTAREANSTTQISITFYLTAIREKSL

SEQ ID NO: 841 - protein, 874 aa, Pteris cretica
MFTQDDDWCVYMYCSPGILDMAGRDHNTDVINYEEIYKAVDEVRRTVVPRSKDAVMIVEGMYVNLNSRIDDGLFTGDSSKPKEVWVVADVVALSNDVKVPTSTERLVILCRILHVDGSYARLFSASQNVILDCDYIQESEAISKSWKVRSTELQIHIYAQCLQAPSSKELMPLCVSIPAHRKYPFFIYVMWGLFGMFDSGRGRMMPALSFPRHENNFLGPLFRSREELEQLERLFVVSLCDEQIPAALLSEAAIVEAMQATLLKAELILTYQTQAHGGATAEMARQHVEWLRSQLKGCISSQQEGQVQLDAGLAALLVRAESLSKMPQRTAYNVVPSLTYKAYRDLINRLATAAKDYDNSFMQMRTLVQSSQMTDSDFETLYKALAQKEKDVDEYHQQLARLKQNELKEVSSSLDVLKCELEKQKQAMDEAEQDANDRLKEYEMKQAAKAVFEVVKAVFAMGAAVFTAGTTVGVALEGVEEAVNASGKMKQALELLEKINKLLKVMAAIQKLIDSLNHLKDVIEAPELPSMPTEADWDIFENEIMAVASQLEKAINVANWEAKCKNVAAVGKEFIKTANRMGQLQYEILVQNLQGEVARRHRERLEEIISKGRDYDKYEEIARHVEMLRSNLHIRLLHILDLQRAAVYYHFLLDQTPFTVWVDVDTVTATLIDNEAVILTNLDSLSKCSDKTITYSVEGIPVSLLESGGAWVFSIAVPGSDQSGHKGFKDLSRVRIEYMTIKFAANSAKPQTHDDDDTDDDTVLFLMQAATDFQDRRKADKKVLQYEAAVPLRYRYAYNFSTEEELVDNRPSTSGGVEDFWMRMTPFTTWRLSLPISDPYNEGLKFDDSSASTTTSIRIVFHVSAIRDESYLFR

SEQ ID NO: 842 - protein, 819 aa, Cyrtomium fortunei
KLWKSRKVLGGGGGMVVRSMYLRLDDIDARHLVSPERVENLLVFADVVDVESDWVELPGTKTVLMVCRLMRLKARGGGSTTLDCRLRLATDQVDAGGGVYPPQQLIVAGEASGLLVRCSYRIQVLEKEVDVVRTCHLSPYTDVMAGLIVTMQTLKTPGFTYNCDESDFEAAQTRVVVLEERAMPERTCNSVCFLLRTSLSSLQNALPKICVIPHPAARLHLEWVTHSCLPLWLLIRGQYLHEKKDLVITNELQAQILTYIVKLIRMGEVAFTKLVQEGLIGYKLKGDLKVIFETMHNLHRILKIERTRTIGEVANYDEVFNSMNQVREVVSTTECSELMVVQQMYLLLDDLNVRLLQNPHKVKKLVVFADVIEIDSQNLQIPSSAKVTIICRILRTKRPKKLNFPYLYHNSSPLSLYVSPFGLLQQGSISKVCIYTKELIMNDPFNPLGVYSTSVELPNLVEVLYVLPLIIDSLQSIYYILTCQKSTAIISTTTQDHLQWLISLLNQMFAKSGNNIIDFWRQWAEDLSNHIEDVTQHTLSTSEVVDYAQVYKNVNAHYAEVYKSVNQMRRIVATQGRECLEVVTMHRMYFLLDELNASLFKNPDAIKELYVYADVVELGSQNLQIPGSTKIIIICRILRVKGPHKLTFPYLSHDRDISPLSLFVSTVRLFDWPSTLGVCIYAQHLIMNNPFNPTTCASTCFQLSIPVELLGNPNVLPLIEADLQSAELILTYQTSVTTTITATKDHLQWLITLLTEVKDDANLNEVSFRDLLNHAQSILRKSNGSTTLLVPSLRYDKYSDLIKTMANAASAYDSEFKQL

SEQ ID NO: 843 - protein, 616 aa, Colysis wrightii
RAYSANRVRPKFPLHHLSHVFLYLVYVNLNLRIVEGLFLNRGGSKPRKVWVVADMVALSNDVMVPTSTERLVILCCILHVDGSFARLFSNSQAVAVLNQNHGEVSFYNSCKVLSTELQIHIYAQCLQAPSSKELMLLCISIPVHRGSPFALNVTWGHFGMFDSHRSRMMPVLSFQYNDAKNFVGPLFRSREELEELERLFVVLLCDEQIPAALLGKAAIVEAMQATLLKAELILTYQTQAHGGATAKMARQHVKWLRSQLKGCISSQQEGQVLDAGLAALLVRAESLSKMSEQIAYNVIPSLTVIPSLTYKAYRNLINKMATTAKDYDNSFMQMWTLVQSSQMTDSDFETLYKALTQKETDVDEYHQQLARLKQKELKEVSSRLDVLKRELNKQKQAMDEAEQDANDRLKEYEMKQAAKVVFGVLMAVFAIGAAVFTAGATVGVAMKSVEEAVNASGKLKQAFELLKNTNMLLKVMAAIQKLMDSLDHLKDVIEAPVLQSMPTEADWDIFENEIMAMASQLEKAINVANWKAKCKNVAVVGKEIIRTADCMGQLQYEVLVQDLQGGVARRHKKRLEEIVSKGRDYGKYEEIARHFEMLRSNLHIRLLHILDLQRLY

SEQ ID NO: 844 - protein, 580 aa, Blechnum occidentale
LNWVSCLSSTSVDGEVSKDLGALLFRVQALLKLPLSYEVVPSLEYTTYQMLIDNLARAAEAYNNEFNRVDLFIRQNQILGSYLVEENKALAEKEKDMEELHNTLVKRKQDELEATIKKVDLLQIQMAEQKRAMDKAKEDMDSGLKEYEEKEIAKAFFAVLSAIGGCVLAFATGGAAGGGAAEGVEKAAEAVKEAEKAVSLLVKLVDTFKKLMDVLKKVQKVVEAVLAIKDLIEKIVDITKMVNAPPMPDLPSNADWEIFVNEVESVAENMPKEVSEVATWKCKCKNLAAVCREITTTVVYMQQLEYDLLVESLQAKVAAKHAERLQEIKPADVKNYLEMASQMNMRTTRILLNLLKVFKLQRGALLYHYLLPPNPFTGRVTIDTVRNALVQNAADAIMAMQQLGPSNNFEREYVVCDIPVDLLMQGQDWTFTIPIDDYVNTFPSAWCRVRIQHVEIKFSSGHHQPSTNDGEVYFLLQASRTFQDRGHSGDLLNYEAGVPLYYQYAYSLKSGKTTLSNKPTQEDEGLYMRLTPFTQWRLRLSASAYENQGLSFLTAKATDPSENTQISITFHLTAIRTVSF

SEQ ID NO: 845 - protein, 902 aa, Lygodium flexuosum
MSTAEAELMTSTAYESISNGAAWSPTNHTDDVAADDDEEWQDDMISMSDYEKLAYGDHYADYEAIYSGVNQLARAVGIRNRVECGEVLAIHQMFVRLDTLSVGNLLRPERVQRLIVFADVVEIKGATLTLPGSALVLIACRLLRVENRDVELNLSWNLAASSTGTPAPRCSIRAQEVITTSSTMPVLGCTLLIQVMHALTWNNNSTFTQYFGHRFSYSSENSSSTAPPVNQFMSSPGVPPTSNLILVNSKTVNILINNMRWKGYIDFQIGLPPWDDLVEPRLIDGIESTLLIAEMILSFQTNARDTVRAAKEHVEWINKALLQVVDAPNSEARFRLKILLARVQMLLKLSMDGSPPGLVVPVLEYSRYERVIRELVRVAELYNSEFNQLNLFIQQNQILGDYVLQQSKVLAEREKDVQALESSIVARKQQELNSAIRRVELLEAQLQTLATEMDEARENMDKGLQAFRNRQIAMAFFTVLGAALQLGGSLRLSSIPEIVVGIGASISEAINVAQQVEDAVASNNLVDVATKLVDVEKVIEVVNAIKQLYENDAFLEDILDAPEIPVIPSSDWDIMENNIEEVAAGMPTEVSEVVTWKTKGKNVIAVCREICATAISISELHYELFVHGKQRDIAQRHIERLEQMQTANLGEYIEIATQVDMQTMRLLIILLGNLAIQNGALHYHYLLPPEPLISWPSIDSVRRHLIQQEEKALLAEEGMGVPVRLSRAYVVEDVPVKLLLDGGDWIFTIDPSETLGFPDTWYRVRIRYIEMKFTGENIPQNPNTGKVYLLLQASSMFQDRYEREVFHYEAATPHNYQFAYELDSGEVTLPNEPAEAGRHFLMTPFTRWRLRLSASAYQNQGVFFPGTHDDGASTNISITFHVTSIVGIQHRIAEEEETLVIN

SEQ ID NO: 846 - protein, 708 aa, Lygodium flexuosum
MAAKPVLEINVADDMDYAELYRDVNQVTRPVATRQCSEVMAVHRMYFRLDDLHVDNLQNSQVVKQLYVFADVVEVEGDSVELPGSGQVSIFCRVLKLKRSEAAIRLSMLEAVRCTGRQRRTALGQDVEYYWVTPQNRLDGAGPVVTVLAAQLVAPPGAAQLRLTYPLIVDARVYDSDGYHPDFFTSNGTMEWRISTPTNGSSNTNPERTCGARTVIRPGIQWRAFEEEWYPSFRVLVAEAIPPEMLDNSNVLLGMESTTLISELVMAYQREAKDTMAATLRHVEWLNHQLLAVNQDTHSNFQFHHKQQIQSLHFRVQSLLKLPNATDDAKTLIVPPLQYNVYSNLISLMTQAAQSYDNDFKNLNLFMQQNEILGSFLLEQNKAFAAKERDMESHHSQLVNLQEEQLVTAKTRVDRLHDQLERESQAMDEARADMEAGIREYRNRLVAQAFFAVIQAVAAVCLAAFTGGATAAGAVGSAKQLSEAAQALQSVVELLERIEQIVEMVNAVTDFLSALESLNQMIELPEMPELPSTADWDIFENEIVAVAEGMPTEISEVPVWKAKSLNVAALGREIITTVAYIQQLQYDLGVNGMLQRIAQQQAERLESLQIQDLDNYLEMATELDMRTSRMLMSLLKVLTLQTAALSYHYLLPPRPLIGWVRMDSVWNALVRNAYDAVIALSSLGPSTDFVRTYDVKEIVTFEWTRLDL

SEQ ID NO: 847 - protein, 896 aa, Lygodium flexuosum
MAGSAGAADAWREVYRDLNQVSDRIRLDQLEFSEVMVIHRMHIKMSELDLGHLEGAEKVERLYVFADVVELDVVPHESSSDGDVVVRLPGSKFVTFVCRVWHINYALVQISSFARITRSVVLELRHMRWHFNAITGRMHLLDPQTLQDGMDLCFCVHAEVVQIAYYPDVTFPESNDSPSFLRFLRLEIVPDQLRVTTQTDGPVWALRGSLDYFMTPDNDGLLNEVSSQPAGTSFVLNILPDNLDVQLYANLRPNSGTTLTRDPNSIVPAFSVYKEKAGELLSDPNILPAMQTSMLIGELVEVGQPPSVTTEVVRKHVEWLNNLLLQVIEAKRGEHVEDYVELSFRAQYVIKKVGRIQRLVVPQLQYSAYSNLINRLAQVAESYDQALRQFRLFIQQNKILGGFLLEQNRAFAEKEQDMDIFYSELIAQRQIELDSILQKMKHLGAQMETQTADMEQAQADMEAGGSVGIREFQNRQVARGLFAVLGAIAAIGLTLLTGGAAAPLAVSAARSAVSLAGAVAQGLQRVLDILEGLQVVMEVVELINGLISSLQELGQPVELPEMAEMPTEADWLIFVNEVEGVAEQMPTEVSEVVAWKTKCKNVAVLGREMTTLAAYISQLQYDINMQHMLQRIARKQADRLSAIELPDLRNYGELVTQMDMRTTRLLVALIKVVNIQNAALMYQYLSEPTPVYAWPVNMDSVWRMLVQHEQFAIQGLMRLGPAFDIVRTYEVKGIPVSLLLDGDDYEFEIPAQDHVTFPLSLSRVRIHHLEMKFVQGEGDQLHMPVTDTGSVYILLQGSRNFHDRSEGSILHYEAATSLDYHFAYRLDTGETTVTNLPSAEFLTTFMRMTPFTNWRLRVSASAEENKGLAFPTATSADATTHIAITFFISAIRQIAL

SEQ ID NO: 848 - protein, 817 aa, Marsilea mutica
MDYTKLYNDVNQVSIRLELMDFSETMVVHRMLVRLDELDVSSGTGLISGAEKVKNLYIFADVLELPSASKKVRLPGSDKIIIVCRTFVANAQSSSTDLPLTSGVKFNMETGSKSTSVGGAYASSTKSSSSTAKGLQLKIQNGSYKSTMRQGSLSASEASTLELDISTTSGIINVITLNTSPSGSICFVGMTANATPPSTVVDVITDANVLLGMEVSLQIAELVKTANNSEDLLTAVTAHVQWLNDLLLQAVDALGVDKAGEAATLLCRAQGFLKTKRPNLTVPRLQYSMYKNLIDRMVQAAQDYNQSFVQFKLYVAQQKALGSFLLEQNKAFAAKEKDMESFYTQVISLRTTELKNAISRMETLSDQMDEESEAMDKAREDMEAGLIEYQNKQLARAFFAVIGAIASIGLAFATGGATAPGAVSSAQTAVTAAGKAAEGLQKVVDILKGLEEVMALVAAIKELVESISNIGELVNAPEMPDMPTDADWDIFVNEVELVAEQMPTEVSEVPAWKAKSKNVAALGREMTTTATYISQLQFQITVDQMQLEVAQKQYDRLSSITIGDLTSYLEMVSQMDMRTTRILVQLINVLYIQNAALYYEYLLVPEQLSAWPVTMQTIWTLLIQQEVKAITGLTELGPSSDFTRSFIVQDIPLSLLKSGNDWEFEFPVSGADVFPIAWSRVRIDYIEVKFPSTARHAPSTSTGEVYILLQGSRFLDDRAKKDNEYISYEATTGVPYQYAYRLSNGETTVSNIPSQEYRNTFMRMTPFTSWRLRLSISAPENQGLDFPTSTSIGDKTQVEITFYVTAIRRISTRDQPI

SEQ ID NO: 849 - protein, 767 aa, Marsilea mutica
EGEESVHLCRCGGVTISVKESVRLPGSDKIIIVCRTFVANAQSSTTDLPLTSGINFKMETGFKFTGVGGMYITSTKSSSSTTKGLQVRIQNGSYTSTMRQGSLSASEASTLALDISSTSGIINVITLDTSLIGSICFVGMTNSAIAPSTAVDVITDANILLGMKVSLQIAELVKTAHNSEDLLAAVTTHIRWMNSLLVHAVEELGVANAGEAVALLCRTQGFLKTKRPNLIVPRLQYNMYKNLIDRMVQAAQDYNRSFLQFRLHVQQQKALGSFLLEQNKAFAAKEKDMESFYTQVISLRSTELGNAINRMENLSEQMADESAAMDKAREDMEAGLIQYQNRQVARAFFAVIGAIVSTCMAFATGGATAPGALASAQNAVTAAGDAAGGLQRVVDILQQLEEVMALVAAIKDLVDSIRNVGELVNAPEMPEMPSDADWDIFVNEVELVAEQMPTEVSEVPAWKAKSKNVAALGREMTTTATYISQLQFQITVDQMQLEVAQKQYDRLSSITIGDLTSYLEMVSQMDMRTTRILVQLINVLYIQNAALYYEYLLVPEQLSAWPVTMQTIWTLLIQQEVKAITGLTELGPSSDFTRSFIVQDIPLSLLKSGNDWEFEFPVSGADVFPIAWSRVRIDYIEVKFPSTARHAPSTSTGEVYILLQGSRFLDDRAKKDNEYISYEATTGVPYQYAYRLSNGETTVSNIPSQEYRNTFMRMTPFTSWRLRLSSSAPENEGLNFPTSTSTSDTTEVEITFYVTAIRRISTRDASI

SEQ ID NO: 850 - protein, 409 aa, Marsilea mutica
SKRGHGSRPDRVSKQAIGKSILCRDRRHSLYWSSIRHWWCNSTWRMALVAAIKELVESISNIGELVNAPEMPEMPTDADWDIFVNEVELVAEQMPTEVSEVPAWKAKSKNVAALGREMTTTATYISQLQFQITVDQMQLEVAQKQYDRLSSITIGDLTSYLEMVSQMDMRTTRILVQLINVLYIQNAALYYEYLLVPEQLSAWPVTMQTIWTLLIQQEVKAITGLTELGPSSDFTRSFIVQDIPLSLLKSGNDWEFEFPVSGADVFPIAWSRVRIDYIEVKFPSTARHAPSTSTGEVYILLQGSRFLDDRAKKDNEYISYEATTGVPYQYAYRLSNGETTVSNIPSQEYRNTFMRMTPFTSWRLRLSSSAPENEGLNFPTSTSTSDTTEVEITFYVTAIRRISTRDASI

SEQ ID NO: 851 - protein, 522 aa, Huperzia carinata
ILVFPFCVCMCARGSLLLHSGKILGSYLLQQNKAFAAREKDMEAFHGLVVARKQEELRAAQEMMNSLNAQLTHQTEAMDQAKKDMDEGLKRYRDEQVARAFFAVLKGVLEIGAAIFTGGATAGLAVKGAINAVNAVSNLAGMLDMVIKIMEGMEQVMEVLNAIDDLVTALSEINQMVEAPQMPSMPSTAEWDIFENEIEEVAESMPTEVTEARTWRTKCKNVAALCRAICTTGSYIGQVQYDLFVHSNQELIARRQAERLEAIQPANLTNYLEMATQMDMRTSRMLLGLLKVLTLQNGALKFHFLLPPKPFTGWVTMDMVRNALVQHEADALAARERLGPSTDFTWTYVVSDIPISLLLDGDDWIFTIDPADGSAFPLSWSRVRIRYLEMKFTGGEEFHKPTTNSGEVYILLQASRIFQDRLLGEVLHYEAAVPLRYQYAYALESGETTVSNRPSQQHDGEYMQMTPFCQWRLRLSASALENQGLAFPTAAADLNSSTTQVSITFWLTAIRRIDTRLLEVSQ

SEQ ID NO: 852 - protein, 824 aa, Polypodium musifolium
MFVRMDDLDVSSGCRSAMADLDYSKLYQDLNQISVRLEKTEFSEVMVVHRMFVRMDDLDVSSGSGLLSGAEKVKRLYVFADVVELPSKQVRLAGTDMIVVFCRIFVPEGRHYAELFLPSMNMSMVGADGEGSIRGVILSPTVLTTLSNALQFRLECGSMTSVMRLNDVSAGATLTCNVQGASACVPLKVKTTGTSPGNICVLGLSTAAVVPESVVAVITDANILLGMQVTVLIAELVKIAHNSDGVIAAVTRHVEWLNHLLVQAQAAAPSEDVVALLYRTQAFIKLRKEGLIVPRLQYHMYKDLIDRMVQVAQSYDQDFKQMKLYVEQNKILGSYLLEQNKAFAEKEKDMDASHSQVIALRTSELQSTIERMDDLSKQMEVQSKAMEKAKADMDAGLIVYQNKQVADAVFAVMEAIASIGLAFATGGATAPGAVASAGAAVSAAGKAGEGLKKVVEILEGLQAIMEVIAAIKGLVQSLQKIGQLVNAPEMPDLPSEAEWEMFVKEVEAVAAQMPTEVTQVPAWTAKCKNVAALGREMSTTAAHIAELQYEIQVQGMLQQIAKKQADRLSSIKPADLTNYFEMVSEMDMRTTRMLLELIQVLNIQNGALRYEYLQPAAPLNAWPVTMQTVWGLLVQQEAAAINGLLQLGAPSDFTREYVVGDIPVKLLLGGGDWEFELPVTDADFPLTWCRVRIQHVDMQFDAVAEHLPTTSTGEVYMLLQSSRFFEDRAQHEDEFISYEAGTGLQYQYAYRLATGEATVTNVPSEAYVNTFMLLAPFTRWRLRLSSSAPENKGLAFPTATSADATTRIKITFHVSAIRRISLAR

SEQ ID NO: 853 - protein, 902 aa, Polypodium punctatum
MANDTSSGIVDWRELYRDMNQASDRIRFNQLEFSEVMVIYRMHIKMSELDMGHLEGSEKVKRLYVFADVVEYDANGIARLPGSISVVFLCREWHVSYHLVARMDRNPPRYQLDLAQGVIISLPHMAWHLDVRRQSMHRLDPETLQEFLEPSFCVYADDISVAYYSLNGASWDPALQFPDTAELAKCALLIYSNSNPTPNHVLLTSNRFNGTRWAFRFEFSMYYIDNEDVAKDIALQPPGTRVIFKREGLHLVVLAMDSANRIISFDPERGDLDAYMPAFSLLRQDAKFPIELLTDPNILSAMQTSMLIGELVEVGNPSTAVTEVVHKHVKWLSKLLHQVIEEKNGKDVEDYIGLSFRAQYVIKKVGRIRGLVVPQLQYDVYSNLINRMAQVAESYDQALRQFRLFIQNNKILGGFLLEQNRAFAEKEKDMDVFYSELITQRQIELDNTLQKLKRLSLQMETQQADMEQAQADMEAGLRRFQNRQAARALFAVLGAIAAVGLAFLTGGATAPAALGAARTAVTVAGSVVSGLQRVLEVLEGLQAVMEIVVIIKDLFSALQDLTQAVDLPDMPEMPLQSDWLIFVNEVEAVAQGMPTEVSEVVAWKTKCKNVAVLGQEMTTTAAYISQLQYDIMMQDMLQQIARRQADRLSAIQLPDLTNFTEMVIQMDMRTTRILVALIKVMYIQNAALMYQYLSEPTPVSAWPVNMDTVWRMLVQHEQLAIQGLLRLGPAFDIVRTFVVKSIPVRLLLDGDDYQFEIPVEDPLTFPLSLSRVRIHHLEMKIVQGAHVHTPITATGKIYILLQGSRNFHDRNEGKIMHYEAATALDYQYAYQLDTGETTVTNLPSAEFLRTFTRMTPFTNWRLRLSASADENEGLAFPTATSADATTEIAITFHISAIRRISD

SEQ ID NO: 854 - protein, 907 aa, Polypodium punctatum
MASITSGAGADWRELYSEMNQVSERLRLDQLEFSEVMIIHRMHIKLSELDLGHLEGADKVKHLYVFADVVELDNAADPSTPVDVRLPGSISVVFLCRVWHVSRRLTVGVNSPQYWLPTFDGRPVRIQLPHVKWHMNTLTRSMHRIDPETLQDLSGPLLCVYADLLRTSLHPPVGHSNWDAALAFPSMTVLREVEVLPCFDHSTPRQGLLTLTSNAAPQWVNQLRAAFIFTDQDAMTEILSLPADASVILNKNRPSIILTAGQSGGYTDRNVSAPAFSVLREGAETPIDSLTDPNFLPAMQTSMLIAELVEVGRPSAAIIEVMHKHVEWLNNLLLQVIEAKKGKDDVEDYIQLSYRSQYILKNVGRIDRFVVPQLQYDTYSPLINRMAQVAESYDQALRQFRLFIQQTQQNKILGAFLLDQNRAFADKEKDMDIFYSELIAQRQIELHNTLQKMEQLSLQMETQSADMEQAQADMEAGLRRFQNERVARAVFGVLGAIAAVALAFVTGGATAGAAIGAAKTAVTLAGAAARGLQQVLEILDGLQAVMEVVGMIKELFESLQELGQAVDLPEMPEMPLESDWHIFVNEVEAVAEQMPTEVSEVVAWKTKCKNVAVLGREMITLATYISQLQYDIQMQDMLQQIARKQADRLSAIQLSIPNTGYTEMLMQMDMRTTRLLVALIRAVHIQNAALMYQYLSEPIPVSAWPVNMDAVWRILVQHEQSAIQGLLRLGPAFDIERVFVVEDIPVSLLLEGDDYEFDIPVEDNITFPLSLSRVRIHHLEMKFVASGGQKQVHMPVTDSGSVYILLQSSRNFHDRNERAVVHYEAATSLDYHYAYNLETGQIKVTNQPSAEFRKTFMRSTPFTNWRLRLSASAEENKGLAFPTATSADATTQIVVTFHISAVRQVAF

SEQ ID NO: 855 - protein, 922 aa, Polypodium punctatum
MHPTGHDGISNIPLEQCHDDYAEERQMKPRFETNGLELDYEKIYAGSNSIAREVGLDKVNCGEVMAIHQMFFRLDTLSQELLRRPELVKRLIVVADVVEIEGSNATLSLPGSSLVLIFCRILILKSRNLVLDLDNWNLRAASTTPLHRCSIRAQRVVIASGFSLYSSLLIQVKHKFEWSDGTHLDQYFGRPFYFTAIGINSSATITTTATSAMRSINTWPGTAPVSNFIRVNSEKFNVLVNAVPWKGVIDCQAALPSLDDLLHPDVISGFQSTLLIVETILNFQTDNPAIISLARQHAEWILDSLLQVVPLPDSTLGVPEAKTLLARAQILMKLPTDGSQHLRVPLLAYGEYQEDIERLLRNAEAYDQEYRELTRFVQLVEIIGSEFLQLSRSLAQRERDIEAFESLAVIRKQSELDQAIRRMNSLMPEIERRSFEMADAKARMEEGCLFYRMFTSYITVKCKTSKLTCLIAAGLEDYNRRQLTRAIFGILGALLQLCASLKFGGGADIAGGIATTVPAAIDLIHAVQDTSASTKLLAISQTLMDLEKIVDVVNAVNTLAESATELEDIVHAPELPLIPPYTWDILENDIEEFAALMPLEVSEVVTWKAKCRNLVAVCREICIAASFACEVQYELFVHARQQEMARRQAERLEGMQTAALSSYIELATQADMRTARLLLSLLNVLAGHQGALHYHYLMELEVFTSSWPTVDSVRTHLLQLNQRARARENALFGDGVLTVDLQHDYVLDAIPVSLLLSGEDWNFTINPERNASSFPTPWDYVRIRYVEMRFTGEHLPVSETGEIYLLLRSSANFQDRLEEQVLEYEAAVPLVYQYAYNLSTGATTLPNQPSESGKFFRMTPFTRWRLRLSASAYQNQGVSFPTLPGDPNSDSPVQITITFFVTALPQIQSRSLDMSDGDPTEE

SEQ ID NO: 856 - protein, 888 aa, Nephrolepis exaltata
MEYSDLYADVNQVSLRFQETEFSEVMVVHRMYLRLQDLDMKTQPFPSMLWGSEKVQRLYVVADVVELPSTPTTMLFPATVSVVILCRVLYVHDLSLHIGTCGIQFTLLRLRLVETKEGLVKIFPIPASASSKDTDIGLYIHTDRVIYRQNTSSDDVHILQPLQMRVWGIWADSTFSTEVRANWPTTLAVHVLILWLTASKGQRIPATESDLQRSDEFELLCPPTPDKLKVSFASPVPPGIPSPIEVDFENTFSFFRVPPADAIPTEVLTNPYIILGLQMNMLIAELVLAAHNSPRVINVVTKHVQWLNKILKPKLGLANDDILALVFRVQSFLKTANQPRSIVPRLQYHMYSKLIDHMVQVAQAYDQEFKQLKLFIVQNQILGSYLLEQNKAFASREKDMSAFHSQVVSLRRTELSTAIGRMDQLSVQMERENKEMDQARVDMMQAIKDYQKKQVANALFAVLGAIASVALAFATGGATAPGAVAAAGAAVTAAGKLAEGLQKVVEILQALEVVMEIVGAIRDLVESLQNLGKLIDAPEMPDMPSDADWRIFVNEVEAVAEQMPAEVVGSVAVWKAKCKNVAVLGQEMCTTAAHIGELTYQIKVEEMLQEIAQRQADRLEEITPADLSSYTEMLSQIDMRTTRLLLQLIRVLYIQNAAIKYEYLYDASSQLNSWPVSMDTVWSMLLQQENSALMGLLDLGPSTDFTRSVVVKDIPVGLLVDGNDWQFVISVEDSAAFPIGYSRVRIRYVELKFEQGSNEDGTVIHQPHTDSGLIYMLLQSSRFFRDRKRREILDYEASMGLAYAFAYNLTTGVPTVTNIPSQQYAHTFTSMTPFNNWRLRLSASAEENQGLTFPTATNSPDARTQIALTFHITAIRDIDTLAAADDDE

SEQ ID NO: 857 - protein, 900 aa, Nephrolepis exaltata
MATVVKAGRGTVTRDYEELFRDLNQISDRIRLDQMELSEVMVVHRMFIRLQELDLGHVEGAEKVKHLYVFADVVEVEEGGNSAVWAPLARLPGSITVVILCRVVSVAGILLMGSSTFNNAMRIQLPHMKLRAVEITTQSPAKLQMHRRDAALADEQYPALCIHASVIQCSNIRSAVPVNLQRFPVSLQFFSYMPDRESNEVVLSSASRQLVDEPVDSFNVHTLAPEYIKGVPIPEVATIDSASLSENSYSVQISRLNLSLSNSIAAEGELEPAFSLLKPKVPFTVLIDPNILLAMQTSVLIVELVELAHPSADTRDAVTKHKEWINQLLLQATSANGEGTNASLDEHRALLFRVQYLMKRIPGREDSLVIPRLQYDVYSSLINRMAQVAESYDQSLRQLKLFISQNRILGSYLLQQNQAFAEKERDMDVFHSELLSQRKLELEDTIHRMGLLGSQMETQQREMEQARADMEAGLREFRERQLARAMFSVLGAVAAVGLAFLTGGATAPAAVRAAHTAVSVTSSIRRMFETVMQVLDGIQAVMEWVVLIKELVSNIQDLNKLVEAPEMSEPVPTQADWDIFVNEIEAVAEQMPTEVSEVSTWKAKCKNVAALGREMTTMAVYISELQYEIKVQSMLQEIARSQADRLSNIQAANLRSYTEMVTQMDMRTTRMLVSLLEVLRIQNAALMYQFLSPPTLMDAWPVTMETVWRILVQHEHTAILGLMRLGPSFDFMRTYVVEGIPVDLLLDGEDWEFEIPVEDYITFPPTWSRVRIHHLEITFVQGADVHQPMTETGKVYILLQGSRIFHDRNQDDAILYEAATPLDYHYAYRLDTRETTLSNLPSHDFTRTFMRMTPFTNWRLRLSASAEENKGLRFPTATSADSTTQIAISFHVSAIRRVSL

SEQ ID NO: 858 - protein, 888 aa, Nephrolepis falcata
MEYSDLYADVNQVSLRFQQTEFSEVMVVHRMYVRLLDLDMTTEPHLQMLAGSEKVRRLYVVADVVELPATATNMRLPATASVVILCRVLYVQDVNSPYLACGLHFPLMPLRVVEDTQQGRVRVFPVVGGGSASVDMNNQIGLYIHADRVVYRQGTSTADPLQPLQLRVIGNGSTFSTEVRPDWPKTLEVSSLLMWLTLSKGQPIPAAESDLQRHDEVELLSPPSPDRLSVVFAYLAPGNLFSIAVDVEYIGAGFCYFRIPPADPVPTEVLTDPYVIIGLQMNMLIAELVLAAHNSPPVISVVTKHVEWLNKILQPKLSLPNDDILALLFRVQAFLKMAKQPRSVVPRLQYHMYSPLINRMVQVAQVYDQEFKQLKLFIVQNQILGSYLLEQNKAFASRETEMSSFHSQVVSLRRTELNNAIDRIDQLSVQMENENEAMDQAKEDMMQAIAEYEKKQLANALFAVLGAIASVALAFATAGATAPGAVAAAGAAVSAAGRLAEGLKKVVEILEGLAAVMEIVAAIRDLVESLQNLGQLVETPEMPDMPSNADWLIFVNEVEAVAEQMPAEVVGSVAVWKAKCRNVAVLGQEMCTTAAHIGELTYQIKVEEMLQEIAQRQANRLESLTPANLSSYTEMLSEIDMRTTRLLLQLIRLLHIQNAAIKYEYLYAAGEQLNSWPVSMDTVWSMLLQQENSALVGLLDLGPSNDFTRSFVIQGIPIGLLVDGNDWQFSIPVEDSPTFPIGYSRVRIRYVELRFDQGTSDEGRMIHQPSTSSGLTYMLLQSSPVFRDRRRREVLEYEASMGLAYAFAYNLTTGVPTLTNVPSPEFANTFMRMTPFNSNWRLRLSSSAMENQGLMFPTASSADDTTQITITFFISAIRGIDTRAAVEI

SEQ ID NO: 859 - protein, 872 aa, Nephrolepis falcata
MEYSDLYHDVNMLSLPLHRTELSEVMVVHRMHVKLRDLNLETAVSDKVHRLYVVADVVEVTLDTVSLPCKVSVVILCRVLHVEQSSVLFSSLLLPNMNVRVVLSNNRMQVYPMATDGSADDVALYIHADRVIRRQGAWTLVRVMHMSITGPESTFSVPHLPDPALFNRVMVNVQMDAGPSIPASESDLQRSDETELVSRVSNGVTVSASIAGSAWTMPADNPSATFTVFPNPPAQPVARGVLTNPYVIIGLQMNMLTAELVQAAHNAPLLIRAVTRHVEWLNKILVEALQVVSGNEDLLALLFRTETYLKMATESRSVVPRLQYHMYSDLIHRMVQVAQAYDDEFQRLRLFIAQNEILGSYLLEQNKALASREREMSAFHSQVVSLRRTELDNCLQRMDQLNVQMERENKAMEEAQEKMNEALEAHQRRGLARALFAVLGAIAAVALTVATGGAAAPAAVAAAGQAVTAAGTLAQGLKTVVEILEGLQALMDLVVIIRELVENLQTIGQLIDAPEMQEMPSNADWLIFVNEVEAVAAQMPEEVFGSVAVWKAKCRNVAVLGQEMCTMAAHIAELQQQIKLEELLQEIADRQADRLLGISAADLSSFTEMLTQIDMRTTRLLLQLIKLLHIQNVAINYEYLFPANGRLSSWPVTMHTVWEMLLQQESSAITGLLALGPSTDFARTFVVHDIPVGLLVDGFDWQFAIPVMDDSSAFPIGFSRVRIRHVELKFSAIDIDASATVHQPRTDNGFIYILLQSARSFSDRRVRQAMDYEASEGLAYPYAYNLTTGVPSLTNLPSQEHANTFMRMTPFTEWRLRLSSSAEENRGLTFPTATSPDDSTQISITFHITAIRAIDFRGMDDEERSKSDSSQK

SEQ ID NO: 860 - protein, 856 aa, Nephrolepis falcata
MASLTPDYYTIYKNVNQVSRPVASRQGSEVMSIHRMYFKLDMLKVELLTEADAVKELVVFADVVEIEGQKMDLPASRFVTIVCRILLVKEEDVELSFKFLEPAPYFQALDPGSQSALVWASSTQVRLSIHAQQVLCNSTRATMRVTHPVVIGNRIDLEYRCLEGQTHCEIIASVGTVSGTMNWQIEISSDHADLSAAQRSHELRSWEGQRETVWSVVEQNEWPAFTSLLDPVLIPLARLGDSNIILGMQSTLLIAELVLSYQTHAQDTVSAAHRHLQWLITNLLQVLKGNSLKEETREQLLALLARAESASKLPLDGTHTLIVPRLQYSQYRGLISSMAAVAQAYNSEFTAVNLFIQQNEILGGYLLQQNKAFAEREKDMTAFHGLVVERRKDELRAAQETMEDLNTQLAQQTEAMDQAKQDMDAGLKRYKNEQVARAFFSVLKAVLEIGAAIFTGGATAGQAVKGAVDAVNAVSSLAGKLDMVLSLMERMEKVMEVLNAINDLVTTLSEINKMVEAPEMPSMPSMYEWDIFENEMEEVAESMPEEVTEARTWKTKCRNVAAVCRAICSTASYIGQLQYDLFAHSNQELIARRQVERLEAIQPADLTDFLEMATQLDMRTSRMLLNLLKVLTVQNGALLFHFLLEPVPFTGWVNMDMVWNALVKHEADALVARERLGPSTDFVQTYVMSDIPISLLLDGDDWIFTIDPADGSTFPLSWSRVRIQYLEMKFTGGEEYHKPASNSGAVYILLQASRNFQDRLHERVLHYEAAVPLRYQYAYNLQSGETTVSNRPSQQHDGEYMQMTPFCQWRLRLSASALENQGLAFPTVAATDLASSTTQISITFYLTAVRSINMRQ

SEQ ID NO: 861 - protein, 838 aa, Osmunda regalis
MASVDYGEIYKNVNQITRPVATKECSEVMAIHRMYFQLDNLDVELLTKANTVKQLVVFVDVVEIESDNVKLPGSSQVTIVCRILHVKKNNVALNFDFLGPTKCNGRSTRGYARIMDDSPVFELSIYAQQLVGDDGAMLRVRHPVTVATIENGHDYEVREGNMEWQIWPYSSTGLSSAARSHELKTIGDHGRERTWLIIEQEWSRFIAVVPDLIPLRWLTDSNVLLGMEATLLTAELILSYQTDAQATVAAALQHVEWLNTQLLQVVEETDLEATGERLLSLLFRAQSLLKLPVDGSHTLIVPRLEYGLYRDLINRMTDVAEKYNSEFMQMNLFIQQNEILGTYLLEQNKVFAQKEKDMEVFHSSLVTLKQQELTAAMNKMDRLKTQLTEQKTAMDQAKKEMDEGLQKYKNEQVAKAFFAVIVGVLEIGLAIFTGGATAGAAVAGAAEAVEAVSEVAKTLGKVVDILKGLEKVMEVLNAIKDLTASLAEINQMVEAPQMPDMPSEADWAIFENEIEAVAESMPTEVSEVPTWKAKCKNVAAVCREITTTATYIGQLQYDLLVQSMQQQIAMRQAERLEAIQPADLTNYLELATQLDMRTCRMIVGLLKVLTLQNGALQYHFLLPPKPFTGWVSMDIVRNKLVQHDYEAVIARSQLGPSTDFTRTVVVEGIPVTLLLEGDDWNFTIPVHDSAFPSNWSRVRIRYLEMRFSSSEEVHQPTTNTGEVYILLQAARMFDDRLKGDVLHYQAAVPLQYQYAYDLNTGETTQSNLPSEEHTGEYMRMTPFTRWRLRLSASAYENQGLAFPTATALDSTTQISITFFLTAVRQIDTRLTELMDEPQ

SEQ ID NO: 862 - protein, 878 aa, Pellaea rotundifolia
MEYGSLYGDVNQVSLRFEKTEVSEVMVVHRMHVRLEELDMSSDKLKRLYVLADVVELPSQRQTIVIPATVSAIIMCRVLYIPYIWTVVDNCTLVLPHMRFRVVETSNIAPRTGQFFALPPSDAAVDNDVGSFGGLYIHADRFIYRQATSFTSDWVQPLGLRVRGSSTFSSTFRPDWPETLPVNNLNQTITLSLGSFLTPSDSDLQRSDEIEFLQTEPQRVQVVVDRGPGSQTGLVLLVENSPEISVFPAPSLEHVPADVLADPSIILGMQMNMLSAELVLAAHNSQQVIKAVSKHVEWLNKILLQVASPSDDILALLFRVQAFIKMAKQSRFVVPRLQYHAYSNLINRMVQVAQVYDQELRQLRLFIAQNEILGSYLLQQNKAFAEKEKDMSAFHSQVVSMRRSELSSTIEMMGRLSSQMETESEAMDEASDSMVAAIQEYERKQLARALFAVLGAIASVALAFATGGATAPGAVASAGAAVTAAGRLAEGLRRVVEILEGLQAVMEVVAAIRDLVESLENMGQLVEAPEMPEMPTNADWLIFVNEVEAVAEQVPEEVSEVPVWKAKCKNVAVLGQEMCTTAAHISELQYQIRVEEMLQEIAQRQADRLMGISAADLSSYTEMATQIDMRTTRMLLQLIKMLYIQNAAIKYEYLYPASERLNSWPVTMPTVWTMLLQQENAALLGLLDLGPSNDFTVTHVVKDIPVKLLVDGYDWHFEIPVEDSAIFPAGWSRVRIRYVELKFDKQGTDSNIVIHQPSTNTGEIYMLLQSSRFLSDRKREEVMDYEASTGLAYAYAYDLSTGATTLTNIPSEAHANTFMQMAPFTAWRLRLSASAMENQGLVFPTATSPDNTTQISITFYVTAIRRIDTRRQRADAEL

SEQ ID NO: 863 - protein, 564 aa, Pellaea rotundifolia
AATIYNSRGGEFKYSVHSSPMVEIVLHAGDLSQPALMAGWSVQAKPSPDAPAVLFLHSQQVLVITSNSPPISHTSVNVVLQAEGAAQYTLYSDHHQKEGDISEGLPTEIKLERSDLNSTLLAALEATVLTTELILSYMTDATETVTQATLYLEWLNNQLLYAQNGTTDASVSLDETVDRQFHNLMFQVQCLLNKPLVATGLLVPRLQYCTYSNLVNTMARIAENYNKEFRQLTLFIQQNEILGTYLLQQNKALAEREKEMEVFHSELQQVKKDDLMRSLVKLERLEVDMKNMSAEMEQAERDMEAGIIRYRNRQVARAVFSVLGGAIAQLASAFFTGGATAGPAVAGAANAVNQVTEVVTSLQRVVETLEKLVLVTEFLVAMRDLMNAVNDIHGGVPEVPALPDMPSDAEWAIFENEIEAVAAGMPEDVSEALTWKAKCKNVAALGREMVTLATVIGQLQYEIKVHELLQEIARNHSERLEAIQPADLKNYQEIATELDMRTIRMLLGLLEVLSLQNAALHYQYLLPPSPVTTANTNISMSTVWALLLQHEAVAVIRLADLGFA

SEQ ID NO: 864 - protein, 895 aa, Pellaea rotundifolia
MAAGSVGVDYRELYKDLEQISERVRMEQMEFSEVMVIHRMFINLRDLDLGHLEGAERVKRLYVLADVVEAQQSHEGANSLLTPTARFPGSISVVILCRVLWLREVSYGARITAFNVMWLQLPHTRLHAVERSATSIRMYRHGEDEDDDAYPALCIHASIVEYSKIERGHAVPQPSPSTYILRCFALRPSPNSSTNLVFSSQSRSLVDAPVREYFVYPEARNVFPSTFPTSAIIDPASLFRDWYTFRLASVTLNLSAADVSKDQLEPAISLLKDNIPAAILTDANILLTLQISVLIAELVQLAHPSKDTVEAIAKHVEWLNKLLLQATSNSTGMSSHDDYLALLFRVQCLMKTRRRARSLVVPQLQYNVYSNLINRMAQVAQSYDQALQNLKLFIVQNRILGSYLLEQNKAFAERERDMEVFHSEIIAQRMLELKNTILKMDHLSVQMETQREEMDRAREDMEAGLREFQNREVARAMFAVIGAIAMIGLAFVTGGAAAPGAVAAAGNAVTAAGQAARALQRVVEILEGLQAVMEVVVLIKDLVESLQNINQLVDAPEMPEMPSQADWSIFINEIEGVAEEMPVEVSEVSAWKTRCKNVAVLGQEMTTTAAYISQLQYDIKVNSMLQDISRGHADRLSTLRPADLSNYLEMVTQMDMRNTRMLVSLIKVVDMQNAALMYQYLSSPTPLNAWPVTMETVWSMLVQHEHGAVLGLMSLGPAFDFTRTYVVKDIPVSLLLQGEDWEFEIPVQDFVTFPSTWSRVRIHHLEMKFVKDSAHQPTTATGSVYMLLQGSRIFHDRRNHVIRSTDTILHYEAAVSLDYHYAYRLDTGDTTLSNLPSHDFLTTFMRMTPFTNWRLRLSASAEENKELDFPTATSADATTQIAITFHISAIRQTSL

SEQ ID NO: 865 - protein, 544 aa, Pellaea rotundifolia
MVEIVLHAGDLSQPALMAGWSVQAKPSPDAPAVLFLHSQQVLVITSNSPPISHTSVNVVLQAEGAAQYTLYSDHHQKEGDISEGLPTEIKLERSDLNSTLLAALEATVLTTELILSYMTDATETVTQATLYLEWLNNQLLYAQNGTTDASVSLDETVDRQFHNLMFQVQCLLNKPLVATGLLVPRLQYCTYSNLVNTMARIAENYNKEFRQLTLFIQQNEILGTYLLQQNKALAEREKEMEVFHSELQQVKKDDLMRSLVKLERLEVDMKNMSAEMEQAERDMEAGIIRYRNRQVARAVFSVLGGAIAQLASAFFTGGATAGPAVAGAANAVNQVTEVVTSLQRVVETLEKLVLVTEFLVAMRDLMNAVNDIHGGVPEVPALPDMPSDAEWAIFENEIEAVAAGMPEDVSEALTWKAKCKNVAALGREMVTLATVIGQLQYEIKVHELLQEIARNHSERLEAIQPADLKNYQEIATELDMRTIRMLLGLLEVLSLQNAALHYQYLLPPSPVTTANTNISMSTVWALLLQHEAVAVIRLADLGFA

SEQ ID NO: 866 - protein, 866 aa, Pteris cretica
MADVDYSVLYKDLNQISIRLEKMDFSEVMAVHRMFVRMDDLDVSSGTSGGLLVGAEKVKRLYVFADVVELPSKQVRLPGSDMIVILCRIFVQNGRHSTELFLPSMNVSMGAAGNGSIRGANLSTTIMSSSSNVLQFKLQSGTMTSAVRLKDVDAAAALTCDVQAVSASMPLTVMATGTSPGNIWVLGMTTAVVVPKSAVAVITEANILLGMQVTVLIAELVKTAYNSDAVIAAVTRHVEWLNHLLVQAHAAAPKLGMQVTVLIAELVKTAYNSDAVIAAVTRHVEWLNHLLVQAHAAAPNEDVVTLLYRTQAFLKLQREGLVVPRLQYHMYKNLIDRMVQVAQSYDQDFKQLKLYVEQNKILGSYLLEQNKAFAAKEKDMDAFHTQIITLRTTELNNTIERMDQLSKQMDEENEAMEQAKADMDAGLIEYQNKQVANALFAVLGAIASIGLAFATGGATAPGAVSAAGAAVTAAGKAAEGLKKVVEILEGLQVVMEVVAAIKELVQSLQQIGKLVDAPEMPDLPSNADWEIFVNEVEAVAEQMPTEVKQVPTWKAKCKNVAALGREMSTMAAHIAELQYQIQVQEMLREIAQKQADRLSSIKPADLTNYLEMVSEMDMRTTRMLLELIRVLYIQNAALQYEYLQTPAPLDAWPVAMSTVWNVLIQQEMSAITGLLELGAPSDFTQEYVVKDIPVSLLQGGQDWEFELPVSGADFPSSWLRVRIHHVAMQFDGSAAHVPTTNSGEVYMLLQSSRFFDDRARRATEFISYEAGMGLYYQYAYRLATGEATVTNIPSVEYANTFMRLTPFTRWRLRLSASAHENNGLAFPTATSADATTQIKITFSVSAIRRIISTYNPHISLPSDVDR

SEQ ID NO: 867 - protein, 873 aa, Pteris cretica
MDDEMEQEGLKVFAAQSDKDYEALYASVNQIARVVGMSKVRCGEVLAVYRMFVRLDSLDVAHLLQPERVRRLIVFADIVEIDKNSVALPGSALVLINCRLLHLKNRDVQLDLPYWIVENNHNAVALPRCSVRAQQVVVSPNAPTPPPLSSNGSLIIRVKLDLKWADNSPFTQYIVRYFSYNSHEAYTDIKAPVSTSKPPSFHWLLIPPLSDRRIKTAAINDIKWQADIAFQEALPSLDDLRNPHVIKGMESTVLIAETILIYRSDLMDAVTEALQHVQWINKSILEAVRLPNSESGLQLKRLAAHVQMLLKFPVDGSHSLKVPRLQYGKYDDLINRMSVVAEAYDSEFKTLKLFILGNQIIGDYMLTQMKLLAAKEKDVAGLESLIVLRKERELKEALETIDSLEKQLLKQFNEMTEAKTQMEQGLKEYENKKSAQALFAVLGASMQIAGSLMSGNISGVIGGVGGSISAMKDAIDAMDDLAASRSLLNVASGLVEVNRVFEVVNAVSELYETATSLEDLLEAEKMPNIPSSDWDMMENEVEAVAATMPTEVSEALVWKAKCKNVIAVCRELCSTAVSMSELQYDLFVHASMQEIAQRQAERLEEFRASDLGEVTEMATQVDMQTMRVLLSLLSTLAIQNGALQYNYLMVSEPFTGWPTVENVRSSLVRRQQQAIIESSHMGPSTIMPPHAYVLESVPVGLLLSGEDYMFTIDPSCSDFEDSWSRVRILHLEIKFTGGHLPRAGPRNEAYFLLQASSQFQDRWGAQVFHYEAAAPLMYQYAYNLNTGATTLPNMPFEEDTFLRMTPFTHWRLRLSASSPRNEGITFPTALAPDSTTQITVAFTVTAHPRPYVSFSLDGKIDVEQIPEKQPEDQ

SEQ ID NO: 868 - protein, 889 aa, Phegopteris hexagonoptera
RDSVDFGEYRDLNQVSERIRLDQMEFSEVMVIHRMHIKLSELDLGHLDGSEKVKLVYIFADVVESDEEQTGALPVRLPGSISVFIMCRVWHVSAYVGNNGRNHRRVLRLPHMTLHFRNSSSALRSLYRIDPATREDVSEPALSIYADVVQAVLQNPANIPTTSISTDELYFEASGSEILYTRQVLHERVGLFVVRFSQWGIPVTPSVLAHNYSVTSLTNASLASGGGPLPTSIYSPAFSRGMLTSDIPVTFLTDSHILPAFQTSVLIAELVELGRPSQATIDAVGKHLRWLSKLLLKVIEETKGTAFRQDEYLELSFRAQCLIKKMGNIRSLVVPQLQYSVYSGLINRMAQVAESYDQSLTQFRLFIQQNRILGSFLLEQNRAFAQREKDMDAFHLELISERETELENTLEKLDQLNSQMQEESAEMERARERMESSIMEFQRRTILRAVFSIFSALAALSLSFLTAGAAAPAAVAGASAAVNAVSTAATIAVTLKRIMKMLEILETVMEVVAIIKEVISNMQLVDELANAPEMPAMPSDHEWLMFENDIEEVAEEMPPEVSGVSAWKARCKNVAVLGREMITTTTYISQLQYEIKVQRMLQQIAKRQAERLLAIQLPSLTNYTEMVTEMDMRTTRILVTLIKVVEVQNAALMYQYLSQPTPVNAWPVTMDTLWRMLVQHEHSAIRGLLRLGPSFDAGNCNYVVRRIPVYLLTHGEDWQFEIPLQLNDDDENEEDEYPAQVPFPTSWSRVRIHHLEMKFVRAPHVHYPTTKTGSIYILLQGSRIFEDRNQGARVHFEAATSLDYHYAYRLDTGETTLSNVPSIEFTQTFMRMTPFTTWRLRLSSSAIENEGLAFPTAMQSGPDSTEIHPDATTEIQITFNISAVRQISF

SEQ ID NO: 869 - protein, 896 aa, Phegopteris hexagonoptera
MIAAGAEDKLMSTCTYESVSPGSAESPAKRIDDDEAAAADEEYLQDDMSSMYAYEKLADDHDHYADYEAIYNGLNQIARAVGIRNTVECGEVLAIHQMFMRLDTLSVENLLRPERVKHLIVFADVVEIEGAALTLPGSTLVLIACRLLRVKNRDVVLNLSWNLASSSSPPRCSICAQHVITTSSTPLSGCTLLIQVMHALTWSNGSTFTQYFGRQFSYSSQNSSSTAPPPNQSLSSIGVPPSSNFILVNSKTLNILINNIRWKGYIDFQVGLPSFDDLVEPHFIDAIESTLLIAEMILTFQTNVRDAVTAAKEHVEWINMALLQVVDGPNSDARFRLKILLARVQMLLKLSLYGSTPGLVVPVLEYGVYDRVIKEMVRVAELYNNEFNQLNLFIQQNQILGNYLLQQSKVLAERERDVEALESSIVARKRQELNGSIRRVELLEQQLQALASEMDEARENMETGLQVFRDRQIAFAFFAVLGAALQLGGSLRLTSIPEIVVGIGTSISDAVNLAQQVENAVASNNLVDVASKLVEVEKVIEVVNAIKQLHDNETELDDILNAPEIPIIPSSDWDIMENNMEEVAAGMPTEVSEVVTWKTKSKNVIAVCREICRTAISVSELQYELFVHGKQQEIAQRQAERLQQIQTVELGEYIEIATQVDMQTMRLLIILLGNLAIQNGALHYHFLLAPEPLTGWPSIDSVRRHLILQEEKALLAEEGMGVPVRLTREYVVEDIPVSLLLSGNDWIFTIDPSSLSETPVFPNTWNRVRIRYIEMKFTGEHLPQSPNTGKVYLLLQASSMFQDQYAQQVFHYEAATPHSYQFAYELDTGVTTLPNLPAQEGRHFLMTPFTRWRLRLSASAYQNQGVFFPGPASASTNISITFHVTSVVGIQTFHDI

SEQ ID NO: 870 - protein, 592 aa, Polystichum lepidocaulon
AHPSADTRATTARHLEWLSGILLQALSKAEGTPSHKEYLALSFRAQYLMKTKGTTRRLVAPQLQYDVYSPLINRMAQIAESYDNSLRQFKLFIAQNQILGNYLLEQNRAFAAKERDMDVFHSELVSQRENELKSTLNRMGHLSTQMDIQVAEMNKAHEEMEAGLRRFQNRRVAEAMFGVLRAIGAIALSFFTGGATAGLAVRAARSAVSAAGALQRVMDTLEDMQAVMEVVFIIKELVESLQDIGTLVNAPDMPEMPSKEAWDIFENEIEGVAEEMPEEVSEVSAWKTSCKNVAVLGREMITTAVYISQLQYDIKEHTMLQEIAQRHADRLSTIKAADLSSYTEMVMQMEMRTARIMVALIKVIHMQNAALMYQCLWPPTQVTTWPSLTIETVWIMLMQHEHSALLGLMRLGPSFDFMRTYVVKDIPVSLLLNGEDWEFEIPVNDYITFPSTWSRIRIHHLEMKFAQGAHVHQPTTDTGKVYILLQGLRTFYDRNEGDTLDYEAAMPLDYHYAYRLDSTGETTLSNLPSNDFIKTFMHMTPFTNWRLRLSASAEENKGLAFPTAEEDRKTGSDATTEIAITFYISAIRRISF

SEQ ID NO: 871 - protein, 718 aa, Selaginella erythropus
SSIIGVAAAAAGSYHIMGNAGSINYEEIYKNANNIGRSMATPMCSEVMSVARMYLRISDLHPTRLKQPEIVKELYVFADVLRLDSFEIVLPGSDIVYILCRMLHWTIPAPALGSTVYIQTPWLKLSSATVIICPQLQQSPLEWFIKAEHSTRTDAPAPLFLHAKQVLTTSNTGSSHLNVVLQLAQEVAQTYMLSDQRDVIDVNVESGYTLSRRDLNSTLLSAMEATVLIAELILRYMTHATETVVEATLHVEWLNKLLVNALKDTSTASGSDDEAVDKQLHNLLFQLQFLLTRPLGAGVIVPRLQYSTYSNLVSTMGRIAENYDKEFKQFTLFIEQNEVLGTYLLQQNKAFAEKEREMEVFHSELQQVKKDDLTRAFAKLEQLEVDMREMSAAMEQAEKDMEAGLIRYRNAQVARAVFSVLSAIAQLASAFFTGGATTGQAVAGAANAVNQVTGAVSSLQRVVEPLEKLVLVTEFLVAMRDLVNAVNDIVQQVAPEVPALPDMPSEAEWAIFENEIEAAADEMPEEVSERLQWRAKCKNVAALGREMVTLATVIGQLQYDIKVHELLQEVAQNHAERLEAIQPVDLKNYQEMATELDMRTTRMILGLLEVLSLQNAALHYQFLLPPSPVTTASTTISMSNVWTLLLQHEAAAVISLRICDRPRGDVCCQGHTRWLAARWGGLGLSDLRQRCGRFPIWLEPCADLICRDEVCKSWYRIR

SEQ ID NO: 872 - protein, 702 aa, Selaginella erythropus
MGNAGSINYEEIYKNANNIGRSMATPMCSEVMSVARMYLRISDLHPTRLKQPEIVKELYVFADVLRLDSFEIVLPGSDIVYILCRMLHWTIPAPALGSTVYIQTPWLKLSSATVIICPQLQQSPLEWFIKAEHSTRTDAPAPLFLHAKQVLTTSNTGSSHLNVVLQLAQEVAQTYMLSDQRDVIDVNVESGYTLSRRDLNSTLLSAMEATVLIAELILRYMTHATETVVEATLHVEWLNKLLVNALKDTSTASGSDDEAVDKQLHNLLFQLQFLLTRPLGAGVIVPRLQYSTYSNLVSTMGRIAENYDKEFKQFTLFIEQNEVLGTYLLQQNKAFAEKEREMEVFHSELQQVKKDDLTRAFAKLEQLEVDMREMSAAMEQAEKDMEAGLIRYRNAQVARAVFSVLSAIAQLASAFFTGGATTGQAVAGAANAVNQVTGAVSSLQRVVEPLEKLVLVTEFLVAMRDLVNAVNDIVQQVAPEVPALPDMPSEAEWAIFENEIEAAADEMPEEVSERLQWRAKCKNVAALGREMVTLATVIGQLQYDIKVHELLQEVAQNHAERLEAIQPVDLKNYQEMATELDMRTTRMILGLLEVLSLQNAALHYQFLLPPSPVTTASTTISMSNVWTLLLQHEAAAVISLRICDRPRGDVCCQGHTRWLAARWGGLGLSDLRQRCGRFPIWLEPCADLICRDEVCKSWYRIR

SEQ ID NO: 873 - protein, 575 aa, Polystichum polyblepharum
CGSDQRDVIDVNVESGYTLSRRDLNSTLLSAMEATVLIAELILRYMTHATETVVEATLHVEWLNKLLVNALKDTSTASGSDDEAVDKQLHNLLFQLQFLLTRPLGAGVIVPRLQYSTYSNLVSTMGRIAENYDKEFKQFTLFIEQNEVLGTYLLQQNKAFAEKEREMEVFHSELQQVKKDDLTRAFAKLEQLEVDMREMSAAMEQAEKDMEAGLIRYRNAQVARAVFSVLSAIAQLASAFFTGGATTGQAVAGAANAVNQVTGAVSSLQRVVTEFLVAMRDLVNAVNDIVQQVAPEVPALPDMPSEAEWAIFENEIEAAADEMPEEVSERLQWRAKCKNVAALGREMVTLATVIGQLQYDIKVHELLQEVAQNHAERLEAIQPVDLKNYQEMATELDMRTTRMILGLLEVLSLQNAALHYQFLLPPSPVTTARWTLLLQHEAAAVISLRICDRPRGDVCCQGHTRWLAARWGGLGDGEDWDFPISVRDAEDFPSGWSRVRISYVEMKFVRAGTGSDEEVHQPTTDTGKVYMVLRGEQLFADRKRGASLKYEAATPVEYQNAYRLVTGVGSSSSCR

SEQ ID NO: 874 - protein, 575 aa, Polystichum polyblepharum; identical to SEQ ID NO: 873

SEQ ID NO: 875 - protein, 609 aa, Polystichum tripteron
FIFYFFFHVQTAHNSPQLIKAVTRHVEWLNKMLVQLASPNDDILALLFRAQAYMKMAKQPHPVVPRLRYSMYSGLINRMVQIAQSYDDELKQLKLFIAQNEILGSYLLQQNQAFAAKEKSMSVFHSQVVSLRRIELDNAIEKMNRLSYQMDVEREEMEQARKDMEQALDDYEKKQIANAVFAVLGAIASAALGFVTGGATVAGAVAAAATAVGAIAKLAAMLNKVMGILEIVQQVVETVAALKEVVESINNIGHLVDAPEMPEMPSNADWLIFVNEMEAAADELPAEVGERTVWRAKCKNVAVLGQEMCTTGTHIAELQYQIKVEEMLQEIAERQAERLEGISSADLSSYMEMASQIDMRTTRLLLQLIKVLHIQSAALRYEYLYPASERLNSWPVSMETVWTMLLQQESSSLLGLLQLGVPNDATRTYVVKDIPVEVLQSGRDWPFVIPVDDYADFPSGWYRVRISHVELKIDQQAAGDANDIVIHQPSTATGKLYLLLQSSRFFSDRKPREVMEYEASMGLAYAYAYNLNTGEATLTNIPSSAYADTFMQMTPFTTWRLRLSASAEENQSLVFPTANSPTSTTQVSITFHLTRIRRIESRTFVGDVE

SEQ ID NO: 876 - protein, 721 aa, Polystichum tripteron
MGVPNHIMQLYKDMNQVSEAMRLDQMEFSEVMVIHRMYIKLEELDLGHLEGAEKVKRLYVFADMVEVGQSVVARLPGSFMVVILCRVLWLPDEGSTPFIMLPHLMKLRAVETSEPMQVPVGGDEMFLTGLGLFRAESDEEYPSLCIHAGVIQFSLRKVWSPSQRQFSIFNPHPPPTSTPLENIVFSSPYRKPDTRPVLRFFTSTFLNQRSQITTGPEYFTLDPASRAYTTLSIVTDPPVHWPPASVFDVNTLHPTFSVLDANIPDVLLTDDKILLAMQTSMLIAELVEVAHPASEDTRATTIAKHVEWLSGILLQALSKVEGSPSHYEYLALSFRAQYLIKTRRTTRRRVVPQLQYDIYSPVINRMAQIAETYDDSLRQFKLYIAQNQILGSYLLEQNRAFGAKERDLEVFHSELISQRENELRNTLIRMDDLSRQMDKQTAEMDKAKEEMEAGLRRFHSRTVANAMFGVLGAIGSIALGIFTGGATARRSARRAVSAAQEATRAANTLREVMRILERLEVVLEVVSILKELMESLQDLSTLVEAPEMPDLPTELDWNIFDNEIEGVAAQMPSEVSEVSAWKTKCKNVAVVGREMITTAAYISQLQYDIKEHSMLQEIAQRHADRLSAIKVADLSSYTEMVLQMEMRTARIMVSLIKVIHMQNAALMYQCLWPPTEVTTWPSLTIETAWIMLMQQEQSALLGLMRLGPSVGGEGHSCKPTA

SEQ ID NO: 877 - protein, 869 aa, Polystichum tripteron
MMMRPGFRTDVREDYEVIYAGSNSITREVGLSKVKCGEVMAIHRMFMRLDTLSQELLQQPELVKRLIVVADVVEIEGSGGILTLPGSFSVLIFCRLLILKRKDVVLDLGSWDLRVATTTPPLPRCSIRAQRVVIASSSPLASLLIQVKHELQWSNGSRFDQYFGRPFSFNSSEISSRSFPTTTTSTTSTKLAISTWPGTTPVSNFILVSSEKFNVLVNAVPWKGVIDCQAALPSLDDLMHPDVISGIQSTLLIVETILNYQTNNPTIILAAQQHVEWIVDSLLQVVHLPNSTTDVLELKTILARAQMLQKLPTDGSVQLRVPLLDYGEYQEDIDQLLINAAAYDQEYKELTRFVQQVQILGSEFLELSKNLAEKERQIETFESLAVIRKQNELDQAMRRIKTLQREIGRRSYEMAEARITMEEGLEDYKRRQLQNAVFGLLGALLQLFASVTFGGGAIDIAGAMATTVSAAIDTINLVEDSSASSKLLPMTQNLVDIEKVIEVVNAVNALVESATELEDIIHAPELPLISSYEWDIMENNIEELAALMPSEVSEVVTWKAKCRNLVAVCREICIAASFASEVQYELFVHARQQEMARRQAESLEQMQLASDLSAYVELATQADMRTTRLLLSLLNVLASHQGALYYHYLMEPEPFTFSWPSVDNVRMYLLELNHKARARESTLFGTGVLNVDMEQDYVVDSIPASLLLSGEDWNFTINPGRNASVFPVPWDYVRIRYVEIKFTGQHQPVTQTGEIYLLLKSSANFQDRFEDQVLEYEAAVPLVYQYAYNLGTGSTTVTNDPSTKGKFFRMTPFTHWKLRLSASAYQNEGVSFPTLLNAASDSPVQITITFYVTALPQIQHFSGGPTMEV

SEQ ID NO: 878 - protein, 852 aa, Polystichum tripteron
MEKDNPISGLGERSFYPPTPPVDSVTQAGNDLWLSFPGADKRDVYAHIYSNVNPIGTRAVSTPEPGKVVSVARIYLRLDQVIGHGADAAAGGIIQEMYIFADVIEIEGAKLNAEWEETVLGCHQYILLCNKLLADLTGIRRLQNLMRRVPLVVRLTNRHEPHLTMFTGRLFSPGAPVPHSSVVVHCNQFYCTDNNIINPNYVGLPPIPWAPRWALQHPSLLMAMESTITTSEVILHFIANTEGVDRLVEAMVSHVQWLNLTLLQALQERGTEQSAADLHELRMLFFRTQYLLKWPPGQISILVPRLHYTRFDNLIERMANVAEVYDRDFKQLTLFVAHNQAQGTYLFEQNKALAEREQDMEIAHSALYSMKEADLRRGIQNLETLGGQMQEMNAEMDQAREDMEAGLQRYRDQQIARAVFSILGAIAAIGVAILTGGIGARSALSRSKDAVNGVQTAVQTAARLKAVLKTVEKIVELVDVIWELKELIEEVADLAGMSLETPSRADLPEVPSAAEWYIFENEIEAVAADMPTEVSEVAVWKAKCKNVAALGREMTMQCVVVHELRYDIETHRLMAEVARSHADRLMSIQTFMDLTDYQRMATEIDMRTTRITLGLCKVLSLKHAAMRYEYLLPPSPLSITSFTISTIHSLLINQEVTAVAALNDLGIPTDHTITYLVRDIPIELLLDGEPWDFNIDSMADNLDFPSHWKRVRISHLQLHFTGARLPSTDTGAIYTLLESGSTFFDRGRPQLQEAIIQYEAMVPVAYQYAYDLQTGETTLSNKPSQQFANHFMRMTPFTQWRLRLPRTALENQGLCFPSPTPTPADATTQVSISFHLTAIRSRVHEHTVLRML

SEQ ID NO: 879 - protein, 675 aa, Polystichium tsus-simense
CNPASRLFHRRRHSPYSAGASTAAHSFAAATKSTFGAGTAGLIWTVSEVKKWYPSFKIVLPEVVPLQLLANSNIVLGVEVTALVSELIMTYQRQATELVAATLQHVDWLNTQLLSAQYSSGQLQALHFRVQALLKLLVGDDDAPLVVPPLQYEVYDDLINLMTSAAESYDNAFRQLNLFMQQNEILGSFLLDQNKAFSAKERDMESHHSQLVILQEAELTATNESIKSMNNELAQQNEAMDKAKADMEAGVKQYKDRLVAEAVFGVFRAIAQVCLAIFTGGASAAGAVETARKLSETAKALQSAVTHLEKLEKIVQVINSVTAFLENLQSLNQLIELPKMPDLPTEADWDMFENEVVAVAEGMPTEVSEVPMWKAKCKNVAALGREIIRTVAYMHQLQYDLAVNRMLQNIAQRQAERLEGLQIQDVDNYTEMATELDTRTNRMIMGLLKVLSLQTAALSYHYLLPPRSLTGWVNMDTVWNTLLNNKYDAVKALSSLGAAPTDTIQTYVVRDIPVGLLLEGNDWFFDIPIDDPAFPAPWFRVRIEHVELKFDPTSVHLPTTRNGQVYILLQAARFFADRVYGVVDEVLHFQATNTVHYQYAYRLDTGETTLNNRPTISSAAHYMRMTPFTRWRLRLSASAPQNEGLAFPTATTEDATTQITINFHLTGIHRIQYHA

SEQ ID NO: 880 - protein, 851 aa, Polystichium tsus-simense
MVDYGVVYAHVNEVGRRLGTGKVKCTRVLAKQGMLVRLDELTMEGLQDPYAVEQLVVFADVIEVAGTSVNFSAPIITIVCRILVLLDDSTRLDLTLPRAWNSLSNPARFSIFAQKVVSATPEPRRKSVVLQIRWRGSDMRGAEDVLPVSTAASDLGAEDVSPVSTAVPDLETAWGSIIFVLQGVPDAFRGRVEMNVLASLEVLLDPNVIISIQSTLLIAELILSYRTDLPETVQAAVEHAQWISNTLLAVCNFKCFHPYILHLPCTLMTMTITTCMAFTLMIFQVEASLNSSEEALELRNLLARAQMLLKFPTDGSQSLIIPRLEYRGYQSLIDRMAIVAESYTSELGQFMAFITQTQILLDDLVARTKAFAEKERDVADLQSSIVLRKRTELLQAEQTMMRLNDQLNKQAKDMEQAQHDMEQGLQEYKDREVARAFIGLLVAVVEVGVSFATGGLTALPAIKSSISAAKGLARLAEMIKAVIEVMERLAEAMEVLNAVRELIDAVAASKEIFEAPEMPDMPSIAEWDIFENEIELVAESMPEEVSEARVWRAKCKNVAAVCREVTRMGVYISQLQYELFVHAQQEAIARRHAERLEQIEAANLDNYLEMAMQIDMRTTRLLLGLLKMMSIQNAALQYHYLLPKEPFTGWPTIEIVRRRLIQKESQAVHGLEAMGMTTNFTRTFNVEDIPVDLLLSGEDWNFAIPPDSNSPFPLTFSRVRIRHVEMKFANTLALPSTTSGKLYILLQGSRTFHDRRFHEILEYEAAVPNAYPYAYNLSTGETTLSNEPSEHDAGNLLFFRMTPFTNWRLRLSSSAFENEGLLFPQGSTTTIIEITFHITAIRSIDTRLEVS

SEQ ID NO: 881 - protein, 886 aa, Pteris ensiformis
MEYSSLYGDVNQVSLRFQNTEFSEVMVVHRMHVRLEELDMTGVEGIEKVKRLYVLADVVELPSRATTVFEYVRLPATISAIILCRVLYIPEVQRLSGSAFVAQCSLDFPFMRLHVVGTSEGGAGVMQAFSSDAAASSIGVYLHADRFIYRQTTSTASDRVLPLDVRVSSGSSTFSTTARPDWPENLNVSFVTCGPQFLSKGPPLTSSDSDLQRSDEIELLDRQDGTPLLHVAFNPLAPGNVGGSQGRFQPSSACSFFHVPPPDVSADVLTDPSIILGMQMNMLIAELVLAAHNSPQVMNVVTKHVQWLNKILLQVASPNDDILALLFRIQAFMKMAKEPRFVVPRLQYHMYGSLINRMVQVAQNYDQEFRQLRLFIAQNKILGSYLLEQNRAFAEREREMSAFHLQVVSMRRSELRSAIETMNTLSLQMQTESEAMNEAQENMVEAIQEYERRLLARALFSVIGAIASVALAFATGGATAPGAVAAAGGAVSAAGRLAEGLQRVVDILQGLQTVMEVVVAIRDIVESLQNMGQLLEAPEMPEMPTNADWLIFVNEVEAVAEQVPTEVAEVPVWKAKCKNVAVLGQEMCTTGAYISELQYQITVEEMLQEIAQRQADRLVGISAADLSSYTEMASQIDMRTTRILLELIKMLYIQNAAIKYEYLYDANEKLNSWPVSMETVWTMLLHQENAALLGLLNLGPANDFTVTYAVKGIPVKLLVDGYDWNFEILVEDFAIFPSGWSRVRIRYVELKFDQQGTDSSNILIHQPSTNTGLVYMLLQGSRFLHDRKRGEVMDYEASMGPVYAYAYDLHTGATTLTNIPSQEYANTFMQTTPFNAWRLRLSASAMENQGLVFPTATSADSTTQISITFYVTAIRRIDHRQEGNVE

SEQ ID NO: 882 - protein, 878 aa, Cyathea cooperi
MEYSSLYSNPSLVNPNFQATEFSEVMVVHRMHVSLSHLNINTANSLLQPTLLQGSDKVKRLFIVADVVEAPTSRVFLPASLSVVVLCRLLYVTVPPPAFDTFGPAVTLTFPFMRFFVNEAIADFFPSKDDDAGIGCYIHADRIIRRLAMPQSDLRLRLIMTAEGPSTFSRDNWPISHFRFTQETVTADEPVAMADSELQRSDEYQQKDATVQFPLAVITFNPWLPPNGISDMGRGLDTTRPPVFCYFQFRSDVPSHILSNPYIVLGMQMTMLFAELVQVAHNSPHLLKLVTKHVEWLDKLLHQVTSPNDDILGLLFRVQVFKRTSERRHFLVPMLQYHMYSNLINRMVQAGEAYDRDLRNLQFFIATNQILGNYLLQQNKAFAEKEREMSGFHSNVVEMRRDELRNALDKMDLLALQMERENQAMQEARDALDKAILEYQRRLMANAILSVVRAVVSVALAFATAGATLAGAVASAGQAVSAAGQAAASLNKVVATLQALEGVMTFVIALREVVDSLGNMNNLINAPEQPELPSDADWLIFVNEIEAVAGQMPEEVVGPVSVWQSKCKNVAVLGQEMCTTTAHIGELTHQIKVEEMLQGIAQRQADRLNAISSPQDLSSFTEMLSEIDMRSLRLLLQLIRLLYIQNPALKYEYLFTTTDYLDTWPVNMETVRNVLIQQEAQAIRGLLQLGPSNDHTLTYVVKGIPVGLLVEGHDWVFSIPVQDFDAFPEGFSRVRIRYAELKFDAADQQTEGGMIHLPSTNTGLLYLLLQCSPSFADRKQQEVLDYEATSGVAYAYAYNLHTGAPTLTNIPSPEFANTFMRMTPFNTWRVRLSASAPENQGLSFLTANSPDDTTQITITFHFSAVRRIHHDPSQGTPI

SEQ ID NO: 883 - protein, 882 aa, Onoclea sensibilis
MEYSDLYADVNQVSMRFRETEVSEVMVVHRMHVRLQDLDMNGMPTNYSTVRRLYVVADVVELPSIVSNWMRFPGSLSVVILCRVLYVRDFNSVLGSCSLNFNFMRLRIVETKLGSVNVFPVPASASEDANNIGVYIHADRVIFRQDTSSSNIVRPVQLFVLGGSTFSTEVRPDWPTSLEVISIHLWPTLSKGQPISAAESDLQRSDEFELLPSPVGPDKVSIFFPSANPAPGNVIGQVLDVENIGAAFAFFHLPPLDPVPTEVLTDPYIISGLQMNMLIAELVLAAHNSPRVIKVVTKHVEWLNKMLQPKLHAAKDDILALLFRVQSFLKMAKEPRSVVPRLQYHMYSNLINRMVQVAQAYDQEFKQLQLFIVQNQILGRYLLEQNRAFASRERDMSSLHTQVVALRRTELNNAIDKMDLLSVQMERENEAMDQAKEDMMQAIEDYERRQVANALFAVLGAIASVALAFATAGATAPGAVAAAGAAVSAAGRLAEGLKRVVEILQGLEAVMEIVAAIRHLVESLQNIGSLIDAPAMPAGMPSDADWLIFVNEVEAVAEQMPAEVVGSVAVWKAKCKNVAVLGQEMCTTGAHIGELTYQIKVEEMLKDIAERQANRLEGITAADLSSYTEMLSQIDMRTTRLMLQLIRVLHIQNAAVKYEYLYDASRQLDSWPVSMETVWRLLLQQESDAITGLLSLGPSTDFTRSFVVKDVPVGLLLDGNDWQFVIPVEDSVAFPIGFSRVRIRYVELRFEQGSNDDGAAIHQPRTDSGSIYLLLQSSPFFSDRRRSAILDYEASMGLAYAFAYNLTTGVPTLTNVPSQEYANTFMRMTPFNNWRLRLSSSAEENRGLAFPTATSPDDRTQITLTFYITAIRGIDTRVLADE

SEQ ID NO: 884 - protein, 870 aa, Onoclea sensibilis
THFLECVGYWALCWRHQFPQPTCTIMGNVMTGPSYEEIYKNANYIHRSVATPICSEVMSVSRMYLALSELDVQRLKNPEIVKELYVFADVIFWDVFPTWPGLEAVFILCRVLVVDTRHLVAPSASSDGAEAAAADASVSIRAPWLNAPSTTFLISRREQIMPPFSCSIRAKHSTTRASTAPAAFCLQTEQVIDTSFSTNSAVSDNIVLKLETREGSSADDETVDDHIRESFPEVTLSWADVNLTLLWAMEATVLVAELISTYMSSSTRTVKEATLHLKWVNQLLIHALETKDGAPDAAVERLFNTLVLQVQLLLNNPSLVAGIVVPRLQYSTYRNLISTMAHMADGYTREFQQLIMFMEQNEVLGTFLLEQNQAFAAKERDMESFHAELHKVKTNDLIQALATLEQLEVLMTEMNAEMEQAQQDMEEGLRRFRNRQVARAVFSVFRSIVAIASSFFTGGATAGAAVQSTKNAVDQVVEMKSSLERIVETLEKLLLVSDFLVAMKELINAVQDVHGVAANVPTLPDMPTEAEWTIFENEIEAVAAEMPEEVSEVLVWKTKCKNMAAIGREMVTMATVISQLQYDVRMHDLLQEISRNQAERLEAIKPVDIRNYQEMATQLEMRTTHILLGLLEVLSLQNAAIQYQYLMPPSPVIMNNTIITMSDVWTQLLQQEAAAVVALSDLGFPTDRKVTYVVEGIPVGVLLDGQDWDFSISTEDVDHFPFGWSRVRIAYVEMKFVSARLGRSTEPAGNEDQIHEPITDTGEVYMILRGEQTFADRKRGEKVKYEAVAPVKYQYAYHVETGEMTEHNRPTEEFANHFMRMTPFTRWKLRMSGSARENRGLAFPTATAMDATTQIAIHFHVTAIRAADWH

SEQ ID NO: 885 - protein, 889 aa, Onoclea sensibilis
MARSAEAADAWREVYRDLNQVSERMRLDQLEFSEVMVIHRMHIKMSELDLGHLPGAEKVERLYVFADVVECDTPPYHSWSGPDLVIRLPGSMSVTFMCRVWHINHGVSQLQSFLDAKTLVLQIGHMRWHFNQTTGSMHRLDPQTLQNSPEPCFCVYAEVVRVAFYPDVTFPEFNNSPDLQFLQLQFGSDQLRFTSQTTNQPVWAIRGSLTFSMIPDNDGLLNEVSSQPAGTSFVLNMPDNLNVQLYANLNATSGTTLSRDPDSIIPAFSVLREKAVELLTDPNILPAMQTSMLIGELVEVGHPSEATLEVVRKHVEWLNHLLLQVIEAKQGQDVQDYIELSFRAQYVIKKVGRIHRPVVPQLQYNAYSNLINRMAQVAESYDQALRQFRIFIEQNKVLGGFLLEQNRAFAEKEADMDVFYSELITQRQIELDNTLQKMEHLGSQMDTQRADMEQAQADMEAGIRRFQDEQVARGLFAVLGAIAAVGLTVLTGGAAAPIALTAARRAVTLAGAVAQGLQRVLDILEGLQAVMEVIELIKDLISSLQELGQAVELPEMPEMPLDSDWLIFVNEVEGVAEQMPTEVSEVVAWKTKCKNVAVLGREMTTLAAYISQLQYDIKMQNMLQRIARKQADRLSAIQLPDLKNYAELVTQMDMRTTRLLVALIKVVYIQNAALMYQYLSEPTPVYAWPVNMDTVWRMLVQHEQFAVQGLMRLGPAFDIVRTYVVKSIPVSLLLEGDDYEFEILAEDHITFPLSLSRVRIHHLEMKFVQGGADVHMPITDTGSIYILLQGSRSFHDRNESAIIHYEAATSLDYHFAYRLDTGETTVTNLPSAEFVQTFMRMTPFSNWRLRLSASAEENKGLAFPTATSADATSHVAVTFFISAIRQVSL

SEQ ID NO: 886 - protein, 845 aa, Onoclea sensibilis
MGNVMTGPSYEEIYKNANYIHRSVATPICSEVMSVSRMYLALSELDVQRLKNPEIVKELYVFADVIFWDVFPTWPGLEAVFILCRVLVVDTRHLVAPSASSDGAEAAAADASVSIRAPWLNAPSTTFLISRREQIMPPFSCSIRAKHSTTRASTAPAAFCLQTEQVIDTSFSTNSAVSDNIVLKLETREGSSADDETVDDHIRESFPEVTLSWADVNLTLLWAMEATVLVAELISTYMSSSTRTVKEATLHLKWVNQLLIHALETKDGAPDAAVERLFNTLVLQVQLLLNNPSLVAGIVVPRLQYSTYRNLISTMAHMADGYTREFQQLIMFMEQNEVLGTFLLEQNQAFAAKERDMESFHAELHKVKTNDLIQALATLEQLEVLMTEMNAEMEQAQQDMEEGLRRFRNRQVARAVFSVFRSIVAIASSFFTGGATAGAAVQSTKNAVDQVVEMKSSLERIVETLEKLLLVSDFLVAMKELINAVQDVHGVAANVPTLPDMPTEAEWTIFENEIEAVAAEMPEEVSEVLVWKTKCKNMAAIGREMVTMATVISQLQYDVRMHDLLQEISRNQAERLEAIKPVDIRNYQEMATQLEMRTTHILLGLLEVLSLQNAAIQYQYLMPPSPVIMNNTIITMSDVWTQLLQQEAAAVVALSDLGFPTDRKVTYVVEGIPVGVLLDGQDWDFSISTEDVDHFPFGWSRVRIAYVEMKFVSARLGRSTEPAGNEDQIHEPITDTGEVYMILRGEQTFADRKRGEKVKYEAVAPVKYQYAYHVETGEMTEHNRPTEEFANHFMRMTPFTRWKLRMSGSARENRGLAFPTATAMDATTQIAIHFHVTAIRAADWH

SEQ ID NO: 887 - protein, 885 aa, Thelypteris noveboracensis
MEYSVLYGNVNQVSLRFEKTEFSEVVVVHRMHVRLAELNVTLGDTLLQGSDRVKRLYVLADVVEVPPNFSTWMSLPGTVSVVILCRILYFPYLEDASFASGWVVHAPLLRLRVVQTSTDFAQVFAIPENDSSAAAVADIGLYIHADRIIYRDDPARNIPVIEVQVRGNSTFSPYLPGFPDTGVKLSTVQCVREFSKGQPLAPEDSDLQRSDEIELIAPSGSEQRRLTAAFGDSTVVGVSLLFDPSTSFDFLSLGPSQINVPAAILSDPNIILGMQMNMLIAELVLAAHNSPQLIKAVTRHVEWLNKMLVQLASPNDDILGLLFRVQAYKKMAKQPHPVVPQLRYRMYQDFINRMVQIAQSYDGDLKQLKLFIAQNEILGSYLLEQNKAFAAKEKSMSAFHDQVVSLRKSELVNAIDKMNRLSYQMDVEREAMDQAQKDMEQGLEEYEKRQIVNAFFAVITAISLAALGFVTGGATVAGAVAAAGQAVNAVASLAATLQKVMGILQIIQQVVETVAAIREVIELFDNMGQLVAAPEMPEMPSNADWLIFVNEVEAMAEQLPVEVDARIVWKTKSKNVAVLGQEMCTIGTHIAELQYQIKVEEMLQKIAETQAERLEGISPADLSSYMEMVSQIDMRTTRLLLQLIRVLHIQNAALKYEYLYAADEQLDSWPVTMDTVWTMLLQQESASLSGLLSLGPANDDTRTYVVKDIPVEVLLSGGDWPFVIPVDDYTVFPAGWFYVRIRHVELKFEQQAGSDQNDIVIHQPSTNTGKLYMLLQSSRFFQDRNQAGVVMDYETSTGLSYPYAYNLNTGETTHQNVPSSEYAFTYMQMTPFTTWRLRLSAAAEENEGLVFHPPPTSPTSTTQISITFHVSRIRRIEYTLAGDVE

SEQ ID NO: 888 - protein, 896 aa, Thelypteris noveboracensis
MAAADDWSEVYRDLNQVSDRIRLDQLEFSEVMVIHRMHIKMSELDLGHLEGAEKVKHLYVFADVVEYDSLDAGLPGSIVRLPGSISVVIMCRVWHVSSLLIARPDLNNPQYVRSQDGVKLQLVHMKLYLNLVTNSMHRLDPQTLQEVPEPCLCVYAHVLRVAFRPDAGDSWDPALLFPAEYVLSTLEALIYDNDTPEHLLFNNSTFSRVWASRFQAIFRFINRDGLQIGSLPPGTIVTLNRDEPSLFSNAYRVNSTSLLNWTTISDVDWLAPAFSILRQRDIPVAVLTDPNILPAMQTSMLIGELVELGHPSAATIEVVDKHVKWLSNLWLQVIEEKKGKDVEEYLELLFRAQYVIKKVGRIRGLVVPQLQYDAYSNLINRMAQVAESYDQSLRQFRLFIQQNKILGRFLLEQNQAFAEKEKDMDIFYSELITQRQIELDNTLQKMKRLGSQMETQTAYMEQAQEDMEEGIRKFQNEQVARAIFGVIGVIAAVGLAFLTGGATAPAALGAARNAVTLAGTVAQTLQKVLDILEGLQAVMEIVAVINELVSSLQDLGQLLDLPEMPEMPMESDWLIFVNEVEAVAEQMPTEVSETIAWKTKCKNVAVLGREMITSATYISQLQYDIKVQSMLQQIAKKQADRLSNIQLPDLTNYTEMITQMDMRTTRMLVALIKVVYIQNAALMYQYLSEPTPVNAWPVNMETVWRMLVQHEQLAVQGLMRLGPAYDIVRTYVVEGIPVSLLLDGDDWEFEIPAEDRITFPLSLSRVRIHHLEMKFVQGANVHMPITDTGSIYILLQGSRNFHDRNEGEIIHYEAATSLEYHYAYRLDTGETTVTNLPSAEFVKTFMRMTPFTNWRLRVSASAEENKGLAFPLATSADATTQIAITFFISAIRQISL

SEQ ID NO: 889 - DNA, 2661 bp, Aglaomorpha Roberts
atggagtatagcagcttgtatggtgatgtgaaccaagtgagcctgaggttccagaacacggaattctcagaggtcatggtggtgcatcggatgcatgtgcgcctggaggagcttgacatgacgggggtcgagggcatcgagaaggtcaaacgcctgtacgtgctggcggacgtggtggagctgccttccgtagcaacccaggtgtttcagtatctgcgccttcctgcgtccatttcagcgattatcctctgccgcgttctctatatccctgaagttgatcagagggccggcatggctcaatgctcgctcgacttcccgtttatgcgcctccatgttgtcgcctctgcacacgagaatggtggaggtgttatgcaagccttttcctcggacgccacccccagcaatattggcatctacctccatgctgaccgcttcatctaccgccaggccacatctccggccagcaactttgtcttgcccctggaggtgagggtcagctttggcagctctaccctctccggcacaaccatccgtcccgactggcaaaaccttaatgtctccaacatcagctacgggccgcagcacctgtccaggggcgcacccctcacatcctcagactctgacttgcagagatctgacgagatcgagctcctggcagagcaagataattggagccctcttttacacgttgcgttcaacccgaatgcaccacctggcaacatcccgggtacacaaggaatattccagccctcctctgcatgcagcttcttccatgtgccgccaccgaatgtccctgcgaacgtgctcaccgatccttccatcatcttgggcatgcaaatgaacatgctcattgccgagcttgtcttggctgctcacaattcgccgcaagtcatgaacgtcatcactaagcatgtactatggctcaataagatcttgcttcaggttgcttcacccaatgatgatattttagcactcttgtttcgtatccaagcattcatgaagatggcaaagcagccgcggtttgtggttccacggttgcagtaccacatgtatggcagccttatcaatcgaatggtgcaagtagcccagaattatgaccaggagttcaagcaactcaagcttttcattgcacaaaacgagattttgggaagctatttgctacaacaaaatagggcttttgcagaaagggagagggaaatgagtgcttttcactcgcaagttgtgtcgatgaggagatccgagcttcagtctgccatagaaacaatggacaatttgagtttgcaaatgcaatcagagagtgaagcgatgaacgaagcccaggaggacatggttgaagcaattcaagaatatgaaaggaaattacttgcaagagctctattttctgtgattggggcaatagcaagcattgctcttgcatttgccactggtggtgcaactgcaccaggggcagtggcagcagccggaggggctgtcgctgcagcagggaggttggccgaagggctccaaagggttgtggacatcctacaaggcttgcaagcggtcatggaggttgtggtagccataagagacatcgtagaatcattgaaaaacatgggtcaactagtagaagctcctgagatgccagagatgccgacagatgcggactggttaatttttgtaaatgaggtggaggcagtggcagagcaagtgccaacagaagtggcagaggtcccagtgtggaaggctaagtgcaagaatgtggctgtgctagggcaagcgatgtgcaccacagcagcatatattagtgagctacagtatcagataacggtggaagagatgctacaagagattgcacaacgccaagcagacaggttagtggggatatcagcagcagatctatcgagctacacagagatggcatcacaaatagacatgcgtacaacccgaatcctccttgagctcatcaagatgttgtacattcagaatgcagcaattaagtatgagtacttgtatgatgctaatgagaagcttaactcatggccagtgagcatggagactgtatggaccatgctcttgcaacaagagaatgcagctctcttgggcttgctagacttggggcccaccaatgatttcacagtaacctatgctgttaaagacatacctaccaagttgttagtagatgggtttgattggaattttgagatcgcggtggaggattttgcgatctttccatcaggatggtctcgtgttcgcatacgatatgtcgagcttaaatttgaccaacaaggtgctgatagtagtaacattgtcatacaccagcctagcactaacactggcttagtctacatgctcttacaaggctctcgtttcgtccatgaccgcaaacgtgaggaggtgatggactatgaggcaagcatgggacctgtatatgcatatgcctatgacctcaacactggtgcaaccactctcaacaacatcccctcacagcaatatgccaacacatttatgcaaatgacacccttcaatgcttggagacttcgcctctctgcctctgctatggaaaatcagggattggtgtttcctacagccacttctcctgacaatactacccagatttccatcacattctatgtcactgctattcgacgcatagatcatcgacaagagggagatgtggagtaa

SEQ ID NO: 890 - DNA, 2664 bp, Humata termanii
atggagtatagcagcttgtatggtgatttgaaccaagtgagcctgaggttccagaacacggagttatctgaggtgatggtggtgcatcggatgcatgtgcggctggaggagcttgacatgacgggggtggagggcatcgagaaggtgaaacgcctgtacgtgctggcggacgtggtggagctgcctcccatagccaccacgacgtttgagtatctgcgcattcccgctaccacttcagcgattatcctttgccgcgttctctatattcctcaagttgatcagaggaacccccacttggacgctcaatgctcgctcgacttcccgtttatgcgcctccatgtcgttggatctgcacacccgaatggcgggggtgttatgcaagccttttcctccgacgccaccgccagcgatattggcatctacctccatgctgaccgcttcatctaccgccaggccacatctccggccagcaactttgtcttgcccctggatgtaaggctcaactttggcagctctaccttctcctcagacgtccgtcccgactggcaaaaccttaatgtctccaacatcagctacgggccacagcacctgtccaggggcacacccctcacatcctcagagtccgacttgcagagaactgacgagatcgagctcctggccctgccagatgtttggagccctcttctacacgtcgcgtttagcccgaatgcaccacctggcaacattccaggtacgcaaggacaattccaaccctcctctgcatgcagcttcttccatgtgccgccacctgatgtccctgctaaagtgctcactgatccttccatcatcttgggcatccaaatgaacatgctcattgctgagcttgtcgtggctgctcacaattcgccgcaagtcatgaacgccatcactaagcatgtgctatggctaaacaagatcttgcttcaggttgcttcccccaatgatgatattttagcgctcttgtttcgtatccaagcattcatgaagatggcaaaggaaccgcggtttgtggttccacggttgcagtaccacatgtacggtagccttatcaatcgaatggtgcaagtagcccagaattatgaccaggagttcaagcaactcaagcttttcattgcacaaaatgagattttgggaaggtatttgctacaacaaaacagagcttttgcagaaagggagagagaaatgagtgcttttcactcgcaagtcgtgtcgatgaggagatctgagcttaggtctgccatagaatcaatggacaccttgagtttgcaaatggaagcagagagtgaggcgatgaacgaagcccaggagagcatggtggaagcaattcaagaatatgaaaggagattacttgcaagagctctattttctgtgattgcggcaatagcaagcgttgctcttgcatttgccactggtggtgcaactgcgccaggggcagtggcagcagccggaggggccgtctctgcagcagggaggctggcagaagggctccaaagggtcgtggacatcctacaaggcttgcaagcggtcatggaagttgtggtagccataagagacatcgtcgactcattgcaaaatatgggtcaactagtcgacgcgcccgagatgccagagatgccaacagatgcggattggttaattttcgtaaatgaggtggaggcagtggcagagcaaattccaacagaagtggcagaggtcccagtgtggaaggctaagtgcaagaatgtggccgtgctagggcaagcgatgtgcaccacagcagcatatattagtgagctacagtatcagataacggtggaggagatgctacaagcgatcgcgcagcgccaagcagacaggttagtggggatatcagcagcagatctatcgagctacacagagatggcatcacaaatggacatgcgtacaactcgaatcctcctcgagctcatcaagatgttgtacattcaaaatgcagcaattaagtatgagtacttgtatcctgctaatgagaggcttgattcatggccagtgagcatggagactgtatggaccatcctcttgcaacaagagagtgcagctctcttgggcttgctagacttggggccctccaatgatttcacagtaacctatgctgttaaagacatacctaccaagttgttagtagatggttttgattggaatttcgagatcgcggtggaggattttgcaatctttccatcaggattgtctcgcgttcgcatacgatatgtcgagcttaaatttgaccaacaaggtgctgatagtagtaacattgtcatccaccagcctagcactaacactggcctagtctacctgctcttacaaggctctcgtttcatccatgaccgcaaacgtgaggaggtgatggactatgaggcaagcataggagctgtatatgcatatgcctatgacctcaacactggtgcaaccactctccccaacatcccctcacaggatcaggccaacacattcatgcaaatgacacccttcaatggttggagacttcgcctctctgcctctgcgatggaaaatcagggattggtgtttcctacagccacttctcctgacaatactacccaaattaccatcacattctatgtcactgctattcgacgcatagatcatcgacaagagggtgatgtggagtga

SEQ ID NO: 891 - DNA, 2637 bp, Pellaea rotundifolia
atggagtatggcagcttgtatggtgatgtgaaccaggtgagcctgaggttcgagaagacggaggtctctgaggtgatggtggtgcatcggatgcatgtgcggctggaggagctggacatgagcagcgacaagctcaaacgcctgtacgtgctggcggacgtggtggagctgccttcccagcgtcaaactatcgttattcccgccaccgtttcggcgataatcatgtgccgcgttctctacatcccttacatctggaccgtggtcgacaactgcaccctcgtcctcccgcacatgcgtttccgggttgtcgaaacaagcaatatcgcgcccagaactggccaattctttgccttacccccctctgacgccgccgtcgacaacgacgtcggcagctttggcggcctctacatccatgccgaccgcttcatctaccgccaggccacatcgtttacttccgactgggtccagcctctgggtctccgggtacgaggaagctccaccttctcctcaaccttccgtcctgactggccagaaaccctacctgtcaacaacctcaatcaaaccatcaccctctccttgggctcattcctcacaccctccgactctgacttgcagagatctgacgagattgagttcctgcagacggagccccagagagtgcaagtggtagttgaccggggacctggcagtcagacaggtctggtcttactcgtcgaaaactcccctgaaatcagcgttttccctgcgccatcgctggaacatgtccctgcagacgtcctcgccgatccttccatcatcttgggcatgcaaatgaacatgctcagtgccgagcttgtcttggctgctcacaattcgcagcaagtcatcaaagctgtcagtaagcatgtggaatggctcaacaagatcttgcttcaggttgcttcaccgagtgatgacattttagcgctcttgtttcgtgtgcaagcattcattaagatggcaaagcaatcgcgttttgtggttccacggttacaataccatgcgtacagtaaccttatcaatcggatggtgcaagtagcccaggtttatgaccaggagttaaggcaactcaggcttttcattgcacaaaatgagatcttgggaagctatttgctacagcaaaataaggcatttgcagagaaggagaaggacatgagtgctttccactcgcaagtcgtgtctatgaggagatctgagctgagctctaccatagaaatgatgggcaggctgagctcgcaaatggaaacggagagtgaggcgatggacgaagcctcggacagtatggttgcagcaatccaagaatacgaaaggaaacaacttgcaagggctctatttgcagtgcttggggcaatagcaagtgttgctcttgcatttgccactggaggtgcaactgcaccaggggcagtggcatcagctggagcggcagtcactgcagcaggtagattggcagaaggcctccgaagggtggtggagatcctcgaaggcttgcaagcggtcatggaggttgtggcagccataagagatctcgtagaatcactggaaaacatgggtcaactagtagaagctcctgaaatgccagagatgcctacaaatgcagactggttgatttttgtaaatgaggtggaggcagtggcagagcaagtgcctgaagaagtgtcagaggtaccagtgtggaaggccaagtgcaagaatgtggcggtgctagggcaagagatgtgcaccacagcggcacatattagcgagctacagtatcagataagggtggaagagatgctacaggagattgcacaacgtcaagcagacaggctaatggggatatcagcagcagatctatcaagctacacggagatggcaacacagatagacatgcgtacaactcggatgctccttcagctcatcaagatgttgtacattcagaatgcagcaatcaagtacgagtacttgtaccctgcaagtgagcggcttaactcatggccagtgacgatgccgacagtatggaccatgctcttgcaacaagagaatgcagctctcttgggcttgctagacttggggccctctaatgatttcacagtaacacatgttgttaaagacatacctgtcaagttgttagttgatggttacgattggcattttgagatccctgtggaggattccgcaatcttcccggcaggatggtctcgtgttcgcatacgctatgtcgagcttaaatttgacaaacagggtactgacagtaacattgtcatccaccagcctagcactaatactggcgaaatctacatgctcttacaaagctctcgtttcctcagtgatcgcaaacgggaggaggtgatggactatgaggcaagcacgggactcgcatatgcgtatgcctatgacctcagcactggtgcaaccactctaactaacatcccctcagaggcacatgccaacacatttatgcaaatggcacccttcactgcctggaggcttcgtctctctgcctctgctatggaaaatcagggactggtgtttcctacagccacgtctccggacaatactacccaaatctccatcacattctatgtcactgctattcgacggatagatactcgtcgacaacgagctgatgcggagttatag

SEQ ID NO: 892 - DNA, 2682 bp, Adiantum hispidulum
atggagtatagcagcttgtatggtgatgtgaaccaggtgagcctgaggttcgagaagacggaggtctctgaggtgatggtggtgcatcggatgcatgtgcggctggaggagctggacatgagcagcgacaagctcaaacgcctgtacgtgctggcggacgtggtggagctgccttcccagcgttcaactatcgttgtccccgccaccgtttcggcgataatcatctgccgcgttctctacatcccttacatctttacggtcctcgaaaactgctccttcttcctctcgctcatgcgcttccgggtcgtcgaaacccgcatcgagccgcccaggactggccaattctttgccttaccctccgctgacgccgttgacgacggcgtcggtggctttcgcggcctctacattcttgccgaccggttcatctaccgccaggccacatcgtttacctccgactgggtgcagcctttgagtctccgggtacaaggcagctccaccttctcctcaaccttccgtcctgagtggccagaaaccctacctgtcaccaacctcaatcacaccgtcaccctctccttgggctcattcctcacaccctccgactctgacttgcagagatctgacgagattgagttcctgccgacggagccccagagagtgcaagtggtaattaaccggggacctggcagccagacgggtctggtcttaatccccgaaaactcccctgaaatcagcgttttccctgcgccatcgctggaacatgtccctgcagacgtcctcgccgatccttccatcatcttgggcatgcaaatgaacatgctcagtgccgagcttgtcttggctgctcacaattcgcagcaagtcatcaaagctgtcactaagcatgtggaatggctcaacaagatcttgcttcaggttgcttcaccgagtgatgacattttagctctcttgtttcgtgcgcaagcattcatcaagatggcaaagcaatcgcgttttgtggttccacggttacaataccatgtgtaccgtaaccttatcaatcgtatggtgcaagtagcccaggattatgaccaggagctcaggcaactcaggcttttcattgcacaaaatgagatcttgggaagctatttgctacagcaaaataaggcttttgcagagaaggagaaggacatgagtgatttccacttgcaagttgtgtctatgaggagatccgagctgagctctaccatagaaatgatgggcaggctgagcttgcaaatggaaacggagagtgaggcgatgagcgaagcccaggaaagtatggttgaagcaattcaagaatacgaaaggaaacaacttgcaagggctctatttgcagtgattggggcaatagcaagtgttgctcttgcatttgccacggcaggtgcaactgcaccaggggcagtggcagcagctggagcggcagtcactgccgcaggtagattggcagcaggcctgcagaaggtcgtggagatcctcgaaggcttgcaaaaggtcatggaggttgtggcagccataagagatctcgtagaatcactggaaaacatgggtcaactattagaagctcctgaaatgccagagatgcctacaaatgcagactggttaatttttgtaaatgaggtggagctagtggcagagcaagtgccagaagaagtgtcagaggtcccagtgtggaaggccaagtgcaagaatgtggcggtgctagggcaagagatgtgcaccacagcaacacatattagcgagctacagtatcagataagggtggaagagatgctacaggagattgcacaacgtcaagcagacaggctaatggggatatcagcagcagatctatcgagctacacggagatggcaacacagatagacatgcgttcaactcggatgctccttcagctcgtcaaggtgttgtacattcagaatgcagcaatcaagttcgagtacttgtaccctgcgagtgagcggcttaactcatggccagtgaccatgcccacagtatggaccatgctcttgcaacaagagaatgcagctatcttgggcttgctagacttggggccctctaataatttcacagtaacacatgttgttaaagacatacctgtcaagttgttagttgatggttacgattggcattttgagatccctgtggaggattccgcaaccttcccggcaggatggtctcgtgttcgcatacgctatgtcgagcttaaatttgacaaacagggtactgacagtaacattgccatccaccagcctagcactaatagtggcctaatctacatgctcttacaaagctctcgtttcctcagtgatcgcagacgggaggaggtgatggactatgaggcaagcatgggactcgcgtatgcgtacgcctatgacctcagcactggcgcaaccactctaactaacatcccctcagaggcacatgtcaacacatttatgcaaatgacacccttcactgcctggaggcttcgtctctctgcctctgctatggaaaatcagggactggtgtttcctacagccacttctccggacaatactacccaaatctccatcacattctatgtcactgctattcgacggatagagactcgtcgacaacaagctgatgcggaggggggcgagggagacagactcgaggggggtgtggggtttgggcaacccagctaa

SEQ ID NO: 893 - DNA, 2559 bp, Adiantum polyphyllum Amaretto
atggattacagcactctttacacggatctgaaccagataagcatgcccctggatcgggtagagttctcagaggtgatggtaattcacaggatgtacttgaggttatctgatctgaatgtgggggagctccctggagccgagagcgtgaagcggttgtatgtgtttgcagacgtggtggagctcgcaacatttgcgtatccacagttgcttcatacgcggatgccaggatcggtgacggtgatcattctgtgtcgtcttcttcagtttccaactgatgggtcgttctctgcttggctcgagctgccgttcatggagttgcacacactcatagaacaacacaagtcagagataaaagcagcagatgacgcgaaatggggaacgtatgtacacgcggaggaagtacagctcagcccgctgtttaatgggtggccttatctggttgttgaggcacagcgctgtattataaccgcggccatgcacaatacatttaaccgccctgggtgggttcgctccgttactcaatttacaactgatcagtccggtcgggtagataccacactgctcgctcgaacagaattcggccatatttatctcccactcgagacagattccccaacggcattcagtgtttcacaccgccaaagtacgaatttgcccgtagagtacaccggtattccagtagaggtggtaaccgatcctaacatcttgatgggcatgcagaccagcgtgcacattgcggagctagtgaaggcatgttacccgtcaccagaattagtgagcgctgtaggggtgcacgtgaattggctcaacgaagtcttgctccgagttgtccagaacgaatctcagttgcaagggaccgaggcctacaacgagtgccttgcgcttttgggtcgcattcaatgtgtcatgaagatggggccgtttgtctcggtagtgccgcagctgcaatacagaatgtatggtagcctcatcagacaaatggcccaggtagcacagaactacgaccaagatttcaggcagctcaagttattcattgcccaaaaccaaatccttggcagctatttgctgcagcagaacaaggcatttgctgacagagaggtgcagatggagggctttcattcagcggtcatttctcaaagaaggcaggagttggacgacgccatcgctaagatggaccgactgagcttgcagatggaggaagaggacagagcaatggagcaagcccgaaaagaaatggaagaaggattgaagcagttccagaatgagcaagttgcaagggctgtgttcgctgttcttaaatctgtagctatgattgcgctcgcattcgtcacggctggtgcaacggctcctggggctgcagcatccgcagcgcaagctgtgagcatagccggtcaggccgcacaagctcttcaaagggtggtggaaattctagaggggctcgaggctgtgatggaggttgtggctgctataaaggaccttgtggatgctctggaccaggtaagtcagattgtggatgcaccacctatgccagacatgccctcggaggcggactggagtatttttgtgaatgagattgaagccgtggcagaggggatgccgacggaagtctcggaggttccggcgtggaaggccaagtgcaagaatgtggctgcactgggtagggagatgtgcatcacggcagaacagatttcccagctccagtatgacatctgggtgcaaggcttgttgcgggatatagctcaaagccacgcagaccggctggcagcgattcaacctgctaatcttaccaactatttggagatggcaacacagatggatatgcggactacgaggatactgatagggctcctaaacataatgcgcatccagaatgcggcacttatgtatgagtacctcctaacgcccacgcagctcactgcatggccgctgagaatggatactgtggccaacttgctcatcacgcaggagagtgctgcactgtcaggattagctcagttagggcccccatcggacttcacgagcaggcatgtagtgaaaggcatacctgtgagcttgcttctagacagtggggattgggaatttgagattcctgtgcaaggtggcatgtccagtttcccttccagctggactcgagtgcggattcggcacctggagatgcactttgtgcaggaggcgagcggtggcggcgagattatccaccagcctgccacccagacggggactgtttacatcctcctgcagggctccactgtctttcatgatcgcagaagggaggaggtgatgacctttcaggcagcggttccgctcaactaccattacgcgtaccgcctcgacactggagaagccactcttacgaacgagccctcggaacagtttgccaacacattcatgcagatgacaccgttcactcactggaggctacgtctgtctgcgtccgcagcggagaatgaaggattagcctttcccacagctacagctcccgactccaccactgagattgccatcactttccatgttacggccattagacaaattgactggcggcaagaggaggagtag

SEQ ID NO: 894 - DNA, 2574 bp, Adiantum polyphyllum Amaretto
atggccactgtggactacagcaccctctaccgcgacctcaaccagatctccatgcccctggaccgcgtcgagttcagcgaggtcatggtcatccaccgcatgtacctcaggctctccgacctcaacgtcggcgaactcccaggagctgagcgcgtcaagcgcctgtacgtcctggcagacgtcgtcgagctggcaaccttcgctcaccctcagctgctgaacacccgcatgccaggtagcgtgaccgtcatcatcctctgccgcctgctccagttcccaaccgacggctccttcgcagcatggctggagctcccgttcatggagctgcacaccctcatcgagcagtaccgctccgagatcaaggctgccgacgacgccaagtggggtacctacgtccacgcagaggaggtccagctcagcccgctgttcaacggctggccgtacctggtggtcgaagcgcagaggtgcatcatcaccgccgccatgcacaacaccttcaaccggccaggctgggtccgctccatcacgcagttcaccaccgaccagagcggcagagtcgacaccacactcctcgctaggaccgagttcgggcacatcgacctcccactcgagactgactcaccgaccgccttcagcgtctctcaccgccagtccaccaacctcccagtcgagtacaccggcatccccgtcgaggtggtcaccgacccgaacatcctcatgggcatgcagaccagcgtccacatcgcagagctcgtcaaggcctgctacccttcacccgagctggtgtcagcagtcggagtccacgtcaactggctcaacgaggtcctccttcgcgtcgtccagaaggagtcgcagctccaagggaccgaggcctacaacgagtgcctcgcactcctcggacgcatccagtgcgtcatgaagatgggcccgttcgtcagcgtcgtgccacagctccagtaccgcatgtacggcagcctgatccgccagatggcacaggtcgcccagaactacgaccaggacttccgccagctcaagctcttcatcgcccagaaccagatcctcggctcgtacctcctgcagcagaacaaggccttcgccgacagggaggtccagatggagtccttccacagcgccgtcatctcgcagaggaggcaggagctcgacgacgcgatcgccaagatggaccggctcagcctgcagatggaggaggaggaccgggctatggagcaggctcgcaaggagatggaggagggcctcaagcagttccagaacgagcaggtcgccagagcagtcttcgccgtgctcaagtccgtcgcgatgatcgccctcgccttcgtcacagctggagccacagctcctggtgcagcagcatccgcagctcaggcggtcaacatcgctggtcaggcagcgcaagctctccgcagagtggtcgagatcctcgagggcctcgaagccgtcatggaggtcgtcgccgcgatcaagcacctcgtggacgcactggaccaagtcagccagatcgtggacgcaccaccgatgcccgacatgcccagcgaagcggactggagcatcttcgtgaacgagatcgaggcggtcgccgaaggcatgcctaccgaggtcagcgaggtgccagcctggaaggcgaagtgcaagaacgtcgccgcactcggacgcgagatgtgcatcacggccgagcagatctctcagctccagtacgacatctgggtgcaagggctcctgcgcgacatcgctcagtcgcacgccgatcgccttgctgccatccagcctgcgaacctgaccaactacctcgagatggccatccagatggacatgcgcaccacgcgcatcctcatcgggctcctcaacatcatgcgcatccagaacgccgccctcatgtacgagtacctcctcacgcccacccagctcacagcatggccactccgcatggacaccgttgccaacctcctcatcacgcacgagagcgctgcactcagcggactcgctcagcttggaccaccgagcgacttcacctcgaggcacgtcgtcaagggcatccctgtcagcctgctcctggacggaggagactgggagttcgagatccccgttcaaggcggcatgtcctcgttcccgtccagctggaccagagtccgcatccgccacctcgagatgcacttcgtgcaggaggccagcggaggtggtgagatcatccaccagcccgcaacgcagaccggcaccgtctacatcctgctccaaggctccaccgtcttccacgaccggaggcgcgaggaggtcatgaccttccaagccgcagtcccgctcaactaccactacgcctaccgcctggacacaggtgaggctaccctgacgaacgagccgtccgagcagttcgccaacaccttcatgcagatgacgcccttcacccactggaggctcaggctctccgcatccgcagctgagaacaagggcctcgcctttccgaccgctacagcacccgactccacgaccgagatcgccatcacgttccacgtcaccgccatacgccagatcgactggaggcaggaggaagaggaggagtag

SEQ ID NO: 895 - DNA, 2577 bp, Adiantum polyphyllum Amaretto
atggccactgtggactacagcaccctctaccgcgacctcaaccagatctccatgcccctggaccgcgtcgagttcagcgaggtcatggtcatccaccgcatgtacctcaggctctccgacctcaacgtcggcgaactcccaggagctgagcgcgtcaagcgcctgtacgtcctggcagacgtcgtcgagctggcaaccttcgctcaccctcagctgctgaacacccgcatgccaggtagcgtgaccgtcatcatcctctgccgcctgctccagttcccaaccgacggctccttcgcagcatggctggagctcccgttcatggagctgcacaccctcatcgagcagtaccgctccgagatcaaggctgccgacgacgccaagtggggtacctacgtccacgcagaggaggtccagctcagcccgctgttcaacggctggccgtacctggtggtcgaagcgcagaggtgcatcatcaccgccgccatgcacaacaccttcaaccggccaggctgggtccgctccatcacgcagttcaccaccgaccagagcggcagagtcgacaccacactcctcgctaggaccgagttcgggcacatcgacctcccactcgagactgactcaccgaccgccttcagcgtctctcaccgccagtccaccaacctcccagtcgagtacaccggcatccccgtcgaggtggtcaccgacccgaacatcctcatgggcatgcagaccagcgtccacatcgcagagctcgtcaaggcctgctacccttcacccgagctggtgtcagcagtcggagtccacgtcaactggctcaacgaggtcctccttcgcgtcgtccagaaggagtcgcagctccaagggaccgaggcctacaacgagtgcctcgcactcctcggacgcatccagtgcgtcatgaagatgggcccgttcgtcagcgtcgtgccacagctccagtaccgcatgtacggcagcctgatccgccagatggcacaggtcgcccagaactacgaccaggacttccgccagctcaagctcttcatcgcccagaaccagatcctcggctcgtacctcctgcagcagaacaaggccttcgccgacagggaggtccagatggagtccttccacagcgccgtcatctcgcagaggaggcaggagctcgacgacgcgatcgccaagatggaccggctcagcctgcagatggaggaggaggaccgggctatggagcaggctcgcaaggagatggaggagggcctcaagcagttccagaacgagcaggtcgccagagcagtcttcgccgtgctcaagtccgtcgcgatgatcgccctcgccttcgtcacagctggagccacagctcctggtgcagcagcatccgcagctcaggcggtcaacatcgctggtcaggcagcgcaagctctccgcagagtggtcgagatcctcgagggcctcgaagccgtcatggaggtcgtcgccgcgatcaagcacctcgtggacgcactggaccaagtcagccagatcgtggacgcaccaccgatgcccgacatgcccagcgaagcggactggagcatcttcgtgaacgagatcgaggcggtcgccgaaggcatgcctaccgaggtcagcgaggtgccagcctggaaggcgaagtgcaagaacgtcgccgcactcggacgcgagatgtgcatcacggccgagcagatctctcagctccagtacgacatctgggtgcaagggctcctgcgcgacatcgctcagtcgcacgccgatcgccttgctgccatccagcctgcgaacctgaccaactacctcgagatggccatccagatggacatgcgcaccacgcgcatcctcatcgggctcctcaacatcatgcgcatccagaacgccgccctcatgtacgagtacctcctcacgcccacccagctcacagcatggccactccgcatggacaccgttgccaacctcctcatcacgcaggagagcgctgcactcagcggactcgctcagcttggaccaccgagcgacttcacctcgaggcacgtcgtcaagggcatccctgtcagcctgctcctggacggaggagactgggagttcgagatccccgttcaaggcggcatgtcctcgttcccgtccagctggaccagagtccgcatccgccacctcgagatgcacttcgtgcaggaggccagcggaggtggtgagatcatccaccagcccgcaacgcagaccggcaccgtctacatcctgctccaaggctccaccgtcttccacgaccggaggcgcgaggaggtcatgaccttccaagccgcagtcccgctcaactaccactacgcctaccgcctggacacaggtgaggctaccctgacgaacgagccgtccgagcagttcgccaacaccttcatgcagatgacgcccttcacccactggaggctcaggctctccgcatccgcagctgagaacaagggcctcgcctttccgaccgctacagcacccgactccacgaccgagatcgccatcacgttccacgtcaccgccatacgccagatcgactggaggcagggggaggaagaggaggagtag

SEQ ID NO: 896 - DNA, 2583 bp, Adiantum polyphyllum Amaretto
atggccactgtggactacagcctgctttacagggacctgaaccagataagcatggctgtggataaggtagagttctcagaggtgatggcgatccacaggatgtatgtgaatttagctgacctggatgtgggggagctcgtgggagctgagacagtgaagcggttgtatgtgtttgcggatgtggtggagcttgcaccgcggcagcttccaccgggggatcagacgcgaatgccaggatcggtgacggtgatcatattgtgtcgtcttcttcattttccaactggtgagctgccagtaccagcatttctccacctgtctttcatgaagctccatgctatacagagagagcacgatatgtcagagatagcagcagcagatgggatgaactggggagtgtacatttacggggaggaagtacaactcacgggtccttttagcggttatttactttccgtgaggacagatcgcgctattataacctcagccattcacaatttgatcgagcaacctgggagagtaacttccagtattaatattacatggggacaattcgaacccaacactacgagtatgttagcaacaccggccggctggccctctggccaattttttcatctttggggggtttccccttcggcattccttgttttacccagcataagtacgaatgtatccttcacaagtattccagtagaggtggtgactgatccgaacatcttgctgggcatgcagacaacagtgcagattgcggagctagtcaaggcaggtcacccatcacccgacattgtgagcgcggtagcgaagcacgcgatttggctcaacaaactcttgctccaagttgtgcagaacgaaactcacttgcgagggaccgagtcctacaacgagtgcctggcacttttgggccgtgctcaatttgtgatcaagatggggagatatggcttagtagtgcctcagctgcaatacaaaatgtacggcagcctcatcaagcaaatggcccaagtagcacagaactacgaccaagatttcaagcgattcaagttatttattatacaaaatcaaatccttggcagctatttgctagagcagaacaaggcatttgctgacagggagctgcagatggagggcttccattcagccgtgatttctcaaagaaaaggcgagctgaacactgccttcgaaaagatggatcgactgagcttgcaaatggaggacgagaatgccgcaatggagcaagcccaaaaggacatggaggaaggattaaggcagttccagaataggcaagttgcaagagccctctttgctgttcttaaagctgtagctctgattgggcttgcattcgtaacggctggtgcaacggctcccggagctgtggcgtccgcggggcaagctgtgagcatagcaggtcaggccgcccaaggtctgcgaagggtggtggaaatcctagagcagctggaagctgtgatggaggttgtggctgctgtgaaggaccttgtgaattcattggaacaggtaggtcagttggtgcaggcaccggagatgccggacatgccctcggaagcggactggtccatttttgtgaatgaaatcgagcttgtggcggaggggatgccgacggaagtgtcagaggttccagcatggaaggccaagtgcaagaatgtggctgcactgggtcgggagatgagcatcaccgcagtacagatttctgagctccagtatgacatctgggtgcaaggcatgatgcgggatatcgcccaaagccaggcagacaggctggctgcgattcgacccgtggaccttaccaactttctggagatggcaacacagatggatatgcggactacaaggatggtgttagggctcgtcaacatgctccgcatccagaatgcggcgctcatgtacgagtatcttcttacgcccacagagctcagagcatggccgctgggtatggataccgtgagcaacttgctcattgcgcaggagaatgctgcactgttaggattaactcagctagggccctcatctgatttcacaagcacgcatgtggtgaaaggcatacctgtgagcttgctactggatggtgaggattgggagtttgagatccctgtgcaagctgacatgtccagcttcccttcaagctggactcgcgtccgaatacggcacttggagatgcactttgtggcgcaggagatgaacggtgcaagcggaggcgagattattcaccagcctgctactcagactgggactgtctacatcctcctggagggctccactaccttccatgaccgcagaagagacgaggtgatgacctttcaggcagcagctccgctcagctaccagtatgcgtaccgcctcgacactggtgaaaccactctttcaaaccagccctcggaacacttcgctaacacgttcatgcagatgacacccttcactcgctggaggcttcgtctctctgcatccgccttcgagaatgcaggattagcctttcccacagctacagctctcgactccactacccagattgccatcactttctatgttacggccattagacaaattgaccggcggcacgagctggaggagtag

SEQ ID NO: 897 - DNA, 2553 bp, Asplenium nidus var plicatum
atggcctccttcccggactacagggagatttacaagaacgtgaatcaagtgactcgagcggtggccagccggcagggctcggaggtgatgagcattcacaggatgtatttcaagctggacgagttggaggtggagcggctcactgaagcggacacggtgaaggagctggtcgtgttcgcagacgtggtaggaatcgaaggacaacaggtaaagcttccagcctcacgtacagttaccattgtatgccacatccttcatgtgaagcaggaggccgtgaagttgcgattcgactctttcgggcctgttgactgcgatagagggtggcttcctggtataggggaggctgcgcttatactgagcaacagccctcaggttcgattgtccatctacgcgcaacaagttgtgtgcaataccactagagcagtggtgcaggttgcacatccagtgactgtaagccaaacagtgtctccacataacccaagccgatatgccatccccggcaccatgaaatggcaggtcgagatcgcttcagatcagcccgacctctctgctgctgaacgctcatatgaactccgaacagaacgcttttgggatgtgatggagaaggtctggcgcattgaccagcaggaatggtctctcttcacacacctgctgcagggtccagtctcaatccccccagcaatcttgggggattccaatattatccttggcatgcaatccaccttgctcattgcagaactagtcctcagctaccaaacacgtgcagatgacactgtctctgctgcaaacgcgcatcttcaatggctcatcacgaacttgctccaggtgctggacgataattccctagacaaggagaccagggagcagcttcttgcactgcaggcacgggcagagttggcctcaaagctgccacttgatggaagccatactctgattgttccacgcctagagtatggccagtatcagggtctcattaagagtatggctgccgtagctgaggcatataactccgaattcatggccgtgaatctttttatacagcaaaatgagatccttggtagctacttattacagcagaacaaggcatttgctgcacgagagagggacatggatactttccatgggctagctctggcacggaaacagcaggagttgaggactgctcaggagtcgatggaagacttgaatgcccagctgacgcaacagacagaggcgatggatcaagccaaaagggacatggacgcaggtttgaagaaatacagggacgaacaagttgcaaaggcgttcttttcagttctgaaaggcgtgctagcaattggggcagccatcttcaccggtggagcagccgcggggccggcagtaaatgcgggagtggatgctgttaagggagtgagcagcctagcaggaaagctggatatggttatagacattatggagcggatggagaaggtgatggaggtcttgaacgcagtaaacgacctcgtcactgcgctttctgaaatcaataaaatggtggaggcacctgagatgccgagcgtgccgtccacgtatgagtgggatatcttcgagaatgagatggaggaagtggcagaaagcatgccgacagaggtgacagaggcacggacctggaagaccaagtgcaagaatgtggcggctgtctgcagggcgatctgcaacactgcatcctacattggccagctgcaatacgatgtctttgtgcagagcaatcaggcgttgattgcgggaaagcaggcggaacggctggaggcaattcagcctgcagaccttacaaactttctggagatggcgactcagatggatatgcgaaccagccgcatgctactgaacctactaaaggtgatgacgatacagaatgcggcactgttatttcacttcctgctgccacccgtaccattcacaggatgggtgacggtggacatggtcaggaatgccctggtgaaacatgaagccgacgccttggctgctcgggaaagactgggtccttcgacagactttgtgcagacatatgtgatgagcgacattcccatctcactcctcttggatggcgatgactggatcttcaccatcgacccagctgatggctccacgtttcctctgagctggtctcgggtgcgaatccagtacttagagatgaaattcaccggaggggaggagttccacaagcccaccaccagcagtgggagggtctacatcttgcttcaagcttcacgaaacttccaggaccggcttcacggagacgtgctgcacttcgaggcggcggtgccattgcggtatcagtatgcatatgacctgcaatccggtgaaacaactgttagtaatcggccatcacagcagcatgatggtgaatacatgcagatgacgcccttcggccagtggaggctgcgtctgtctgcctcagccgtcgaaaaccaagggcttgccttccctacagctgtggctactgatctggacagctccaccacacaaatctccatcaccttccacctgacggccgtccggagaattgatacgcgcgctcttgtagagctgtag

SEQ ID NO: 898 - DNA, 2553 bp, Asplenium nidus var plicatum
atggcctccttcccggactacagggagatttacaagaacgtgaatcaagtgactcgagcggtggccagccggcagggctcggaggtgatgagcattcacaggatgtatttcaagctggacgagttggaggtggagcggctcactgaagcggacacggtgaaggagctggtcgtgttcgcagacgtggtaggaatcgaaggacaacaggtaaagcttccagcctcacgtacagttaccattgtatgccacatccttcatgtgaagcaggaggccgtgaagttgcgattcgactctttcgggcctgttgactgcgatagagggtggcttcctggtataggggaggctgcgcttatactgagcaacagccctcaggttcgattgtccatctacgcgcaacaagttgtgtgcaataccactagagcagtggtgcaggttgcacatccagtgactgtaagccaaacagtgtctccacataacccaagccgatatgccatccccggcaccatgaaatggcaggtcgagatcgcttcagatcagcccgacctctctgctgctgaacgctcatatgaactccgaacagaacgcttttgggatgtgatggagaaggtctggcgcattgaccagcaggaatggtctctcttcacacacctgctgcagggtccagtctcaatccccccagcaatcttgggggattccaatattatccttggcatgcaatccaccttgctcattgcagaactagtcctcagctaccaaacacgtgcagatgacactgtctctgctgcaaacgcgcatcttcaatggctcatcacgaacttgctccaggtgctggacgataattccctagacaaggagaccagggagcagcttcttgcactgcaggcacgggcagagttggcctcaaagctgccacttgatggaagccatactctgattgttccacgcctagagtatggccagtatcagggtctcattaagagtatggctgccgtagctgaggcatataactccgaattcatggccgtgaatctttttatacagcaaaatgagatccttggtagctacttattacagcagaacaaggcatttgctgcacgagagagggacatggatactttccatgggctagctctggcacggaaacagcaggagttgaggactgctcaggagtcgatggaagacttgaatgcccagctgacgcaacagacagaggcgatggatcaagccaaaagggacatggacgcaggtttcaagaaatacagggacgaacaagttgcaaaggcgttcttttcagttctgaaaggcgtgctagcaattggggcagccatcttcaccggtggagcagccgcggggccggcagtaaatgcgggagtggatgctgttaagggagtgagcagcctagcaggaaagctggatatggttatagacattatggagcggatggagaaggtgatggaggtcttgaacgcagtaaacgacctcgtcactgcgctttctgaaatcaataaaatggtggaggcacctgagatgccgagcgtgccgtccacgtatgagtgggatatcttcgagaatgagatggaggaagtggcagaaagcatgccgacagaggtgacagaggcacggacctggaagaccaagtgcaagaatgtggcggctgtctgcagggcgatctgcaacactgcatcctacattggccagctgcaatacgatgtctttgtgcagagcaatcaggcgttgattgcgggaaagcaggcggaacggctggaggcaattcagcctgcagaccttacaaactttctggagatggcgactcagatggatatgcgaaccagccgcatgctactgaacctactaaaggtgatgacgatacagaatgcggcactgttatttcacttcctgctgccacccgtaccattcacaggatgggtgacggtggacatggtcaggaatgccctggtgaaacatgaagccgacgccttggctgctcgggaaagactgggtccttcgacagactttgtgcagacatatgtgatgagcgacattcccatctcactcctcttggatggcgatgactggatcttcaccatcgacccagctgatggctccacgtttcctctgagctggtctcgggtgcgaatccagtacttagagatgaaattcaccggaggggaggagttccacaagcccaccaccagcagtgggagggtctacatcttgcttcaagcttcacgaaacttccaggaccggcttcacggagacgtgctgcacttcgaggcggcggtgccattgcggtatcagtatgcatatgacctgcaatccggtgaaacaactgttagtaatcggccatcacagcagcatgatggtgaatacatgcagatgacgcccttcggccagtggaggctgcgtctgtctgcctcagccgtcgaaaaccaagggcttgccttccctacagctgtggctactgatctggacagctccaccacacaaatctccatcaccttccacctgacggccgtccggagaattgatacgcgcgctcttgtagagctgtag

SEQ ID NO: 899 - DNA, 2634 bp, Adiantum raddianum Gracillimum
atggatgtggattatgcagccgacgctatggatgtggattatgccgagatatacaaagaggtgaaccaggtgacaaggcccgtccctaccagggtgtgctctgaggtgatgtccatccagcgcatgtacttccagctggatgatctagacgcgaagcttctgaggaacacggaggtggtgaagagattatatgtgttcgcggacgtggtggagatggtgggacagagcgtggagctggcggcgtcggtcgaggtcgtcatcttgtgccggatcttcaagaccactcgaagcgatgcagtgctccgattcttgtccttgacgtcccggctggaatgcgatgcaacaccagtttacgcaagcgccaacgtggtgtctcactttttcgtgcgacctcgacctggagctgcggacccccgtttactcatcactatccacgccacacagctagtggcaccagctcgcacgcaactgcgagtacagcgccccaatgtggtgctgcatcgtgcacaattttgggctttagaagagatttttatgcctggaggagtttctacgggtgctacacaacctgttttaagaccagctgtcacacaggacggcgccatggagtggcgcatttcgccgtatgttgctggcggagccttagctgcacgatcttttcatttcacccacccgcacgtctatcggacatcccaagattatcttggcttcacgggcatcttcatccctgaacccataccgtatgacctacttacaaactccaacatttggttgggcatggaatgcaccacactcatatgcgagttgattgacaagtatcaaaggcaggccacacaaacggttgaagctgcacaccaccatgtggcatggctcgacaagcagcttctgtcgatgggaaatcggatcacctcttctaacatcccaaaaaagaatgtgcagcaaattgaaacacttcattttcgcgttcaatccctactcaagatatatcgtcgcacagcaaatggtgtggatgcgcccctcatagtcccctcgctccaatatgatgtctatgacagaattatcaatctcatgactagagctgccgagagctacgacaacgatttcaagcaactgaaccttttcattcaacaaaatgagatccttgggagtttcttgttggaccaaaatcgagccttcgctcagaaggaaagagacatggagaatcatcatttacaactggttactctacaaggtcatgagctgcaagcaacaggcgataagctacaagctcttaatcgtcaactagctgaacaaagcgaggccatggaccaagcaaaagctgacatggatgcaggtatcaaagaatatagagatgctatgattgcaaatgcaatcttcagtgtgttcaaagccattgctgcattgtgcttggccgccgccacaggtggtgccgcagcgggagctgcggccggagctgctgtggacacagcagcccagctgagtgagcttgcaagggtgctgcaatccgtggtgaaattattgaagaggatagaaaatgtagtgaaaacaatcaatgcaatcactgccttcttgacggaactcgagtcgctcaaccagttgatagaactacctgagatgccagaaatgccaacagatgcagattggtctatctttgagaatgagatagaggctgttgcagaaggcatgcccacagagatatcggaggtgccagcgtggaaggcaaagtgcaagaatgtggcggcagtaggaagagagatcatcacaaccgtggcccatgtggagaagctacagtacgagataagtgtgagtaagatgctccaagatattgcgcagcaacaggcggagagattggagggcttgaggattgaagacctagacaactacctggagatggcaacagagctagatatgagaaccaaccggatactcatgggcttgctggacatgctcagcttacagactggtgcgctctcataccactacctgctgcggcccaggccattcacaggatgggttcgcatggagaccgtgtggcgcacgcttcttcaaaatgagtcggataaactagtggccatagccgcattgggtgcacctcaagagtttagtcgatcctatgtggtggaaaacatacctgtgagcttgctgaaagaaggagcggattggatctttgatatccctgttcatgatcctgtctttccctctctttggtccagtgttcgcattgattacgtggaaatgaagttccccccagatacaacccaccttcccacaaccaagggtggcaaagtgtacttcctcctccaggctgctcgcttctttcatgatcgcctgcaggaagacgaggtcctgcattaccaggctgcagtgcctcttgtctaccagtacgcatatcatgttgagagcggcgagacgactcttagcaaccgtcctccccaggccagctctgctctttacatgcgcatgactcccttcacacgctggaggcttcgtctctctgcttctgctccagaaaatgaagggcttgaattccccactgccacaaccgaagatgccacaactgaaatcgccatcactttctttgtcactgccagacgccgaatcagtactcgtgtcgactctagtagcactacctag

SEQ ID NO: 900 - DNA, 2646 bp, Campyloneurum angustifolium
atggcagtcgcaacattaagggcggctgagtacagggagctgtacaaagaccttaaccaagtgagcgagggtttaatcctggagatgatggagttctcggaggtgatggtaatccatcggatgtatctgaggatggtggagctggacgtgggccatctggaaggagctgaaaaggtgaagcacttgtatgtgtttgcagatgtggtggagatggcacctgcatcgtccactgtgcgactgcctggctcggtctccgtttccatagtctgtcgtgtgctgtggctccctgtgccagtatctaatataccgctgatagcatttccccacttgaaactgcgtgcgaactttgcaagtgggtcgggcaatagacagttcaatgtctatcgaaggactgatggcggatcagaagtagatgaaggtttggccctttgcatacatgcggttgacatccagcttactggtgtgcccgcgttcgctgtgaactctcccgctttttacctcttcactgatccacgtaatctcaccatgccggccgaaggcgctattacgtttggcgaccctgataggcaagtgccagtgctaatgtttcgaatgtacgcagaggcgcagcgcttgtctggggttaacactgggattatacgcatttcccccccattttcaaacaacctgcgcatagccaccacagtccacgccccacctactgtaacattgttaactatagacactcatcacccacatgggcccggtttttggatactgagaggcatcccggacagtctactcaaatctgatcagttaatgctcttgatgcaaatgagcttactaattgcagagctcgcagagctggctcacccctcatcagaaacaagggctgccgtactagagcatgtggaatggcttagcggcgtcctcattgatggagcatctagcacagaagggacacaaatgcatcaagagtacttggagcttttatttcgtgcgcagtacctgctgaagacgacaagcagctcccgtagccttgtggtgccgcaattacaatatgctttgtatagccctctcatcaatcgcatggctcaggtcgctcaaatctacgatgatgcagtcaaccaattcaaactcttcatcgcacagaaccggatacttggtagctatctgcttgagcagaataaggcctctgcggaaagagagagagacttggaggtctttcacgcagagcttatctctcaaatgacgatcgaactcaacagcactctcttgaaaatggaccagttaagtcttcaaatggaagctcaaacagcagacatggagcaagccgaaagagagatggaagaaggactgaggaggttcagaaatagacaagttgcgagagccatcttttctgtgttcagagcaatagctgcagttgcgctaacagttgtaacaggtggtgcagctgcaccagctgccatgaacgcagccaggggtgccgtgtcagtagccgggcaggcagcaagagggttgcaaagtgtgctggaaatcctggagggtttgcaggtggtaatggaggtggtggctatcataaaagagctagtggaatccttgcaagatttagggaagctggtggaagctccggacatgccggagatgccaacggacgcggattgggcgatttttgtgaatgaggttgaggcagttgctgcggaaatgccagaggaagtgtcggaggtggtgacatggaagacaaagtgcaagaatgtggcagcggtaggccgggaattgatgacaacggcagcttacatatcccgcctgcagtatgacatcaaagagcattccatgttgcaggagattgccaagcgtcacgccaataggctggcgaacacccaggcagccaatcttagcagctacacggagatggtgatacagatggagatgcgcaccatgcgaatcatcatctcactggttaaggtggtctacgtgcagaatgctgccctcatgtaccagtacctcagccagcccacacaaatgcggcagacttggcccgtgagcatggagacagtatggagaatgttgacccaaagggagcatgcttcagttctggggttgataaggctagggccgtccttcgacttcgagcgcatctatgtagtgagggacattcctgtgagcctcttgcttactggggaggattgggagtttgagatccccgtctctgacgagaccaccttcccctccagctggactcgcgtgcgcatcaagcacctggaaatgaagtttgtccatgatgatggtagtgcagctgccggccaccaccagcccatcaccgacaccggcaaagtctacatccttctccaaagttcgcgcgtcttccacgaccgcgatcaagctggccgcgagcctctttcttacgaggctgcattgcccttggattaccagtatgcctatcacctcgacacaggagagaccacgctctctaacctgcccaccacccagttcatcaacaccatgactccctttaccaactggaggcttcgcctttctgcctctgccctcgagaaccaaggcctcgactttcctacggctagacaacaaggtgctgtcaaccaggacgccactacccagattgcaattaccttccatgtgtctgccattagacaaatctccttttag

SEQ ID NO: 901 - DNA, 2649 bp, Campyloneurum angustifolium
atggcagtcgcaacattaagggcggctgagtacagggagctgtacaaagacctcaaccaagtgagcgagggtttgatcctggagatgatggagttctcggaggtgatggtaatccatcggatgtatctgaggatggtggagctggacgtgggccatctggaaggagccgagaaagtgaagcacttgtatgtgtttgcagatgtggtggagatggctcctgcatcgtccactgtgcgactgcctggctcggtctccgtttccatagtctgtcgtctgctgtgggtccctgcgcaagtatctgatataccgctgatagcattcccccacttgaaactgcgtgtgatcttgccacgtggtccggtcggtgtagttttcaatcagttcgctgtctttcgaaggactgatggcggatcagaagtagatgaaggtttggccctttgcatacatgcggctgacatccagcttactggtgtgcccgcgtccgctgtgaactctgccgctttttacctcttcacggatccacataatctcaccatgacggccgaaggcgctattacgtatggcgaccttgataggcaagtgccagtgctaatgtttcgaatgtacgcagaggcgctgagcttgtcgggggttaacactgggattatacgcattccccccccatttataaacaacctgcgcgtagccaccacagtccacgccccacctactctattaactttagactcttatatgccaattccgcccgggttttggatactgagaggcatcccggacagtctactcaaatctgatcagttaatgctcttgatgcaaatgagcttactaattgcagagctcgcagagctggctcacccctcatcagaaacaagggctgccgtactcgagcatgtggaatggcttagcggcgtcctcattgatggagcatctagcacagaagggacacaaatgcatcaagagtacttggagcttttatttcgtgcgcaatacctgctgaagacggcaagcagctcccgtagccttgtggtgccgcaattacaatatgctttgtacagccctctcatcaatcgcatggctcaggtcgctcaaatctacgatgatgcagtcaaccaattcaaactcttcatctcacagaaccggatacttggtagctatttgcttgagcagaataaggcctctgcggaaagagagagagacttggaggtctttcacgcagagcttatctctcaaatgacgatcgaactcaacagcactctcttgaaaatggaccagttaagtcttcaaatggaagctcaaacagctgacatggagcaagccgaaagagagatggaagaaggactgaggaggttcagaaatagacaagttgcgagagccatgttttctgtgttcagagcaatagctgcagttgcgctaacagttgtaacaggtggtgcagctgcaccagctgccatgaacgcagccaggggtgccgtgtcagtagccgggcaggcagcaagagggttgcaaagtgtgctggaaatcctggagggtttgcaggtggtgatggaggtggtggctatcataaaagagctagtggaatccttgcaagatttagggaagctggtggaagctccagacatgccggagatgccaacggacgcggattgggcgatttttgtgaatgaggtcgaggcagttgctgcggaaatgccagaggaagtgtcggaggtggtgacatggaagacaaagtgcaagaatgtggcagcagtaggccgggaattgatgacaacggcagcttacatatcccgcctgcagtatgacatcaaagagcattccatgttgcaggagattgccaagcgtcacgccaataggctggcgaacacccaggcagccaatcttagcagctacacggagatggtgatacagatggagatgcgcaccatgcgaatcatcatctcactggttaaggtggtctacgtgcagaatgctgccctcatgtaccagtacctcagccagcccacacaaatgcggcagacttggcccgtgagcatggagacagtatggagaatgttgacccaaagggagcatgcttcagttctggggttgataaggctagggccgtccttcgacttcgagcgcatctatgtagtgagggacattcctgtgagcctcttgcttactggggaggattgggagtttgagatccccgtctctgacgagaccaccttcccctccagctggactcgcgtgcgcatcaagcacctggaaatgaagtttgtccatgatgatggtagtgcagctgccggccaccaccagcccatcaccgacaccggcaaagtctacatccttctccaaagttcgcgcgtcttccacgaccgcgatcaagctggccgcgagcctctttcttacgaggctgcattgcccttggattaccagtatgcctatcacctcgacacaggagagaccacgctctctaacctgcccaccacccagttcatcaacaccatgactccctttaccaactggaggcttcgcctttctgcctctgccctcgagaaccaaggcctcgactttcctacggctagacaacaaggtgctgtcaaccaggacgccactacccagattgcaattaccttccatgtgtctgccattagacaaatctccttttag

SEQ ID NO: 902 - DNA, 2658 bp, Campyloneurum angustifolium
atggcagtcgcaacattaagggcggctgagtacagggagctgtacaaagacctcaaccaagtgagcgagggtttgatcctggagatgatggagttctcggaggtgatggtaatccatcggatgtatctgaggatggtggagctggacgtgggccatctggaaggagccgagaaagtgaagcacttgtatgtgtttgcagatgtggtggagatggctcctgcatcgtccactgtgcgactgcctggctcggtctccgtttccatagtctgtcgtctgctgtgggtccctgcgcaagtatctgatataccgctgatagcattcccccacttgaaactgcgtgtgatcttgccacgtggtccggtcggtgtagttttcaatcagttcgctgtctttcgaaggactgatggcggatcagaagtagatgaaggtttggccctttgcatacatgcggctgacatccagcttactggtgtgcccgcgtccgctgtgaactctgccgctttttacctcttcacggatccacataatctcaccatgacggccgaaggcgctattacgtatggcgaccttgataggcaagtgccagtgctaatgtttcgaatgtacgcagaggcgctgagcttgtcgggggttaacactgggattatacgcattccccccccatttataaacaacctgcgcgtagccaccacagtccacgccccacctactctattaactttagactcttatatgccaattccgcccgggttttggatactgagaggcatcccggacagtctactcaaatctgatcagttaatgctcttgatgcaaatgagcttactaattgcagagctcgcagagctggctcacccctcatcagaaacaagggctgccgtactcgagcatgtggaatggcttagcggcgtcctcattgatggagcatctagcacagaagggacacaaatgcatcaagagtacttggagcttttatttcgtgcgcaatacctgctgaagacggcaagcagctcccgtagccttgtggtgccgcaattacaatatgctttgtacagccctctcatcaatcgcatggctcaggtcgctcaaatctacgatgatgcagtcaaccaattcaaactcttcatctcacagaaccggatacttggtagctatttgcttgagcagaataaggcctctgcggaaagagagagagacttggaggtctttcacgcagagcttatctctcaaatgacgatcgaactcaacagcactctcttgaaaatggaccagttaagtcttcaaatggaagctcaaacagctgacatggagcaagccgaaagagagatggaagaaggactgaggaggttcagaaatagacaagttgcgagagtcatgttttctgtgttcagagcaatagctgcagttgcgctaacagttgtaacaggtggtgcagctgcaccagctgccatgaacgcagccaggggtgccgtgtcagtagccgggcaggcagcaagagggttgcaaagtgtgctggaaatcctggagggtttgcaggtggtgatggaggtggtggctatcataaaagagctagtggaatccttgcaagatttagggaagctggtggaagctccagacatgccggagatgccaacggacgcggattgggcgatttttgtgaatgaggtcgaggcagttgctgcggaaatgccagaggaagtgtcggaggtggtgacatggaagacaaagtgcaagaatgtggcagcagtaggccgggaattgatgacaacggcagcttacatatcccgcctgcagtatgacatcaaagagcattccatgttgcaggagattgccaagcgtcacgccaataggctggcgaacacccaggcagccaatcttagcagctacacggagatggtgatacagatggagatgcgcaccatgcgaatcatcatctcactggttaaggtggtctacgtgcagaatgctgccctcatgtaccagtacctcagccagcccacacaaatgcggcagacttggcccgtgagcatggagacagtatggagaatgttgacccaaagggagcatgcttcagttctggggttgataaggctagggccgtccttcgacttcgagcgcatctatgtagtgagggacattcctgtgagcctcttgcttactggggaggattgggagtttgagatccccgtcgctgaagagaccaccttcccctccagctggactcgcgtgcgcatcaagcacctggaaatgaagtttgtccatgatgatggtagtggagctgccggccaccaccagcccatcaccgacaccggcaaagtctacatccttctccaaagttcgcgcgtcttccacgaccgcgatcaagctggccgcgagcctctttcttacgaggctgcattgcccttggattaccagtatgcctatcaccttgacacaggagagaccacgctctctaacctgcccaccacccagttcatcaacacctacatgaccatgactccctttaccaactggaggcttcgcctttctgcctctgccctcgagaaccaaggcctcgactttcctacggctagacaagaaggtgctgtcaaccaggacgccactacccagattgcaattaccttccatgtgtctgccattagacaaatctccttttag

SEQ ID NO: 903 - DNA, 2538 bp, Blechnum cartilagineum Sw
atggggaacgcctcaagcaccgattatgagcacatctacagaaacgccaacaacataagtaggatggtggctacgccggtgtgctcggaggtgatgtctgtagcccggatgtttgtaaggttgcgggacctggacgcatcgcggttgaagaaccctgaggttgtaaaggaattgtacgtggttgcagatgtggtggatatggaagagtataatgatttgaccctccctgggtcagaaagaatatacctgatctgccgtgtttttacgtggaggagaaaccagccacctccgacaactgtacgcatccgaactccatggttgaatttgtccagctgctccaaactagagatctgccccctgcgtcatgatcgccaggcacagacgtcacctgcattccaatgctttgctagagccaagcatagcacgacgtcggagattgcacctgccgtgctcttcttgcatgcggcacacatttatacgtctaatccagacacagacactagtcacctcaacgtggttctgcaggctcaggaatcagctcagtacacactaatgtcggcggaccagacaccttcaggagaagaaattttctgggaagtggagacttacccattacttcccaggagcgatctgaactcaaccatactgtcagcccaagaggccaacgtgctcgtcatcgagctcattctgagctacataactcatgctaccgagacggttaagcaagcatccttgcaccttgaatggctcaacaagctcctgaattatgcactcaacgacaccagcagtgcatcgacaggatcactagacgacgaggcactggaccgacaattgcacaatctctcattccaagtgcaatttctattgaaccagccgccaacgggtgctggcttaatagtgccacgcttgcaatattatgcatacagtaacctcgttggcacaatggcccgtattgctgagaactacgataaagaattcagacaattttctctttttatagagcaaaatgacgtccttggtacctacttgctccagcaaaacaaggcgtttgcagagaaggagagggagatggaggtttttcatttggagctgcagcaagtgaagaaggatgacttgacgcgggctttggcaaagttggaacgacttgaagttgacatgagagagatgaacgcagccatggagcaagcagagagagacatggaggcagatttagtacagtacaggaaccgtcaagttgctcgggctgtcttctcagtgataggtgccatcgctcagctgggtttagcattcttcaccggtggtgcaactgcagggggagcggtggcaggagtagctaatgccgttagtcaagtgacagacagtgcagctcttgcctccttgagaaggatttcagagaccttggagaagctggttttagtgacagaatttctagtggcaatgagggacctactcaacgctgtgatggatattcatcaagggccaccagaggtacccacattgccagagatggtgtcggaggcagaatgggcgattttcgagaacgagatcgaggctgtggcagcagggatgccagcagaggtgtctagtgtattgacatggaagaccaagtgcaagaatgtggcggctctagggcgagagatgataactctggccacaataatagtggacctgcagcatgacatcaaggtgcatggcctgatgcgggagatggcacaaaaccacgcacaacgtttgaaggcattgcagccagtggacctcaagaactaccaagaaatggcgacagagctggacatgagaactacaaggatgctgctgggcctcctcgaggttctctccctgcagaacgcagcacttcgctaccaatatctgttgccacccagcccagtcaccattgagagcaccagcctcaccatgtccactgcctggacgttactcctacaacatgaatctgcatctgtgataagccttgccgacctaggtttcgcgacagaccaggaggtggcatacatcgtcaagggcatacccgttggcttgctgctagatggggaagattgggactttcccatctctgtcagggatattgcagaaggtgctgctttcccagctgattggagccgtgtgcggatctcacatgtagaaatgaagtttgtcaaaccaggcgctgcgcctgctgatgaagaagaaactgtacatcagcccaccaccaacaccggcaaggtgcacatgcttctccgaggtgaacagctcttcgcagatcgcaagagaggcgaaagcttgaaatacgaggcagctgtgtcgatggagtaccaatacgcgtacaggcttgatacaggtgagaccacccagtccaatcgcccatcacaggagtttggggacaagctcttcatgcagatgacacccttcactcgctggaagcttcgcctgcccactgccgccaacgagaaccgaggattggccttccctacagctagtgccgaaaacgcaaccacccaaattaccattagtttccatgtcagtgccatcagaacaatattctag

SEQ ID NO: 904 - DNA, 2538 bp, Blechnum cartilagineum Sw
atggggaacgcctcaagcaccgattatgagcacatctacagaaacgccaacaacataagtaggatggtggctacgccggtgtgctcggaggtgatgtctgtagcccggatgtttgtaaggttgcgggacctggacgcatcgcggttgaagaaccctgaggttgtaaaggaattgtacgtggttgcagatgtggtggatatggaagagtataatgatttgaccctccctgggtcagaaagaatatacctgatctgccgtgtttttacgtggaggagaaaccagccacctccgacaactgtacgcatccgaactccatggttgaatttgtccagctgctccaaactagagatctgccccctgcgtcatgatcgccaggcacagacgtcacctgcattccaatgctttgctagagccaagcatagcacgacgtcggagattgcacctgccgtgctcttcttgcatgcggcacacatttatacgtctaatccagacacagacactagtcacctcaacgtggttctgcaggctcaggaatcagctcagtacacactaatgtcggcggaccagacaccttcaggagaagaaattttctgggaagtggagacttacccattacttcccaggagcgatctgaactcaaccatactgtcagcccaagaggccaacgtgctcgtcatcgagctcattctgagctacataactcatgctaccgagacggttaagcaagcatccttgcaccttgaatggctcaacaagctcctgaattatgcactcaacgacaccagcagtgcatcgacaggatcactagacgacgaggcactggaccgacaattgcacaatctctcattccaagtgcaatttctattgaaccagccgccaacgggtgctggcttaatagtgccacgcttgcaatattatgcatacagtaacctcgttggcacaatggcccgtattgctgagaactacgataaagaattcagacaattttctctttttatagagcaaaatgacgtccttggtacctacttgctccagcaaaacaaggcgtttgcagagaaggagagggagatggaggtttttcatttggagctgcagcaagtgaagaaggatgacttgacgcgggctttggcaaagttggaacgacttgaagttgacatgagagagatgaacgcagccatggagcaagcagagagagacatggaggcagatttagtacagtacaggaaccgtcaagttgctcgggctgtcttctcagtgataggtgccatcgctcagctgggtttagcattcttcaccggtggtgcaactgcagggggagcggtggcaggagtagctaatgccgttagtcaagtgacagacagtgcagctcttgcctccttgagaaggatttcagagaccttggagaagctggttttagtgacagaatttctagtggcaatgagggacctactcaacgctgtgatggatattcatcaagggccaccagaggtacccacattgccagagatggtgtcggaggcagaatgggcgattttcgagaacgagatcgaggctgtggcagcagggatgccagcagaggtgtctagtgtattgacatggaagaccaagtgcaagaatgtggcggctctagggcgagagatgataactctggccacaataatagtggacctgcagcatgacatcaaggtgcatggcctgatgcgggagatggcacaaaaccacgcacaacgtttgaaggcattgcagccagtggacctcaagaactaccaagaaatggcgacagagctggacatgagaactacaaggatgctgctgggcctcctcgaggttctctccctgcagaacgcagcacttcgctaccaatatctgttgccacccagcccagtcaccattgagagcaccagcctcaccatgtccactgcctggacgttactcctacaacatgaatctgcatctgtgataagccttgccgacctaggtttcgcgacagaccaggaggtggcatacatcgtcaagggcatacccgttggcttgctgctagatggggaagattgggactttcccatctctgtcagggatattgcagaaggtgctgctttcccagctgattggagccgtgtgcggatctcacatgtagaaatgaagtttgtcaaaccaggcgctgcgcctgttgatgaagaagaaactgtacatcagcccaccaccaacaccggcaaggtgcacatgcttctccgaggtgaacagctcttcgcagatcgcaagagaggcgaaagcttgaaatacgaggcagctgtgtcgatggagtaccaatacgcgtacaggcttgatacaggtgagaccacccagtccaatcgcccatcacaggagtttggggacaagctcttcatgcagatgacacccttcactcgctggaagcttcgcctgcccactgccgccaacgagaaccgaggattggccttccctacagctagtgccgaaaacgcaaccacccaaattaccattagtttccatgtcagtgccatcagaacaatattctag

SEQ ID NO: 905 - DNA, 2454 bp, Blechnum cartilagineum Sw
atggccgcagggaaaactgtgccgatgtacaaccacgacaaccagtctgcgacgatttgggctgagggcgagatggtctgggctgagagagagacgtcagatctcctgtgcgtgaattggccgtacatattgctggacgacctgggcgtgagcaggataagcaatccctcagcgataagacacgtagtggtgattgcagacgtggtggagatcgaccagcctctggtgtcgctgccagggagtctaagcatcacccttgtttgccggattcttcgcgtaagacaagcagccggagcagtgctacagttacgacaccttcaagcagaatgggctactttgagtcaggggcaaagtgcgcagttacatctttacgcgcaacaactggtgggtagtttagaggtgcatcagccggtaatgcatacgatagagcccgaaattccagaaactggacttccgcctattgggcctcctttcccaccgatcattgcgtcgtcgtacatgatttgggctatctccccctacacaaacgcatcacaatctaagcctgcctctctcacacttcatgggatcgttgtgacgcactcagatgaatggcacaacagatttaaggtcatcgtgcctcacagccctccgttggaagcttttgaaggtgtcgacatcctcctcgccatagaagcaggtttagctgtcgcagaaacgattctcacctttcagacgcatgcgagagaaagggtagaagcggcacggcggcatgcacagtggctcaaccagctccttcaggaactccttgattccggcaggagcttgaaggagcagattcttggacaattgttccgtacgcaggttctgttgaagctgcccgtggacagaagccaaactgatgcagtgccaagattgcaatatgagcggtacggcagcttgatcaacagaattgcacgagaggccgagagctacattacagagttcaagaaaatgagccttgtcatgcagcaactggatcaaacagctcgcggtagacaattgttggcaatgatggaaacgtttgctgcgaacgagagtgccatggaggtggaggagaccatctatctcgaggacgcagctgtactcgaaactaggcggaaaatttggaaacgtcaactagagaaactgcaagctgaaatggagcaggccaatcaggacatgaatgaaggattgacaggatataacgatcgcatagatgccaatgctatgtttgctattctcaaagctgtggcgagcattggcctagctatgtttacaggtggtgcaacagtagaagtcgcggtagcagaagcagctgtagccgtgagcctagttagcggtacaaatgcagggaggctacagaacgcgatcaaaacgttacaagtcttagtcggggtcatagaggtgctggtggcattaaacagttatttttcacaaggacaaattgagcagattcagaacgcacgggccatgccacagttaccaagcgaagcggaatggtcaagctttgaggatgacattgaggcagtggcagcgaccatgccaaaggaggcatcagaggtgcccacttggaaggccaaatgcaagaatatggccgtattttgtagagagctcacttcgacagcaagcgacctggcactcctccgctccaacatgagggtgcatgatatacgtaaagacatcgccatgatttatatggagcgcctaccacaaatgaacccagcggagaacttcaaggattatgcacaactggtagccttgttggacgtgcagaatagccggatactgttgcgcctacttgacatgtttgtgctgcagaatggagcgctagggtacgagtatttatttcctgtcacacgtctgatcagtggttggccaaaggtggagaatttgagcaccatgcttgcacggtctgaggcggaggcagcagactatctgttgacggaagtgggacagcagaccaacttttccgcgacctatgcagttcccgaaattcccgtgggtttgctacagaatcacgatgattggatattcaccatccccattaatggttctattgtgttgtcggatagatggtctcggatacgcatccacaatgtggatatcaggttcaggcagggcgccctccagccctctaccgttgacgaccaacttcacattctccttgaggctgcaccaacatttcgagatcgtcgtaaacaagatattctcgacttcaaggctgtggtacctgcaagctacacttttgcataccatctacgcacaggtgaaaccatgccaactccagaggtctctgaccaatatcccctcatgaagatgactcctttcactcagtggagactacgtctctctgatcagaatcatggtcttgcattccccacagctttatccccacacgacaccactgttatctcactcactttattcttttctcggatcgtcacagactggtaa

SEQ ID NO: 906 - DNA, 2556 bp, Adiantum pedatum
atggacgtggactacgcggcaatctacaaggacgtgaaccaggtgacgaggacggtggcgaccagccagtgttcggaggtgatggccatccagaggctgtacgtgcggctgaacgacctggacgtgaagggcctgaggaacgtggaggtggtgaagcaagtggtggtgtttgcggacgtggtggaagtggagggcggcgacgtactggagttgcccggctccacccaaatcaccatcgtgtgccgcgtgctccacaccaagcacccttctggtgcagtcattcggctgtcctccttggcgcccgtgaagtgccatgggcgagagcaccgtcacgcatccggcccgcgcacccactctgtcacgcccatgaacggccagctcgcctctgatggccaaatcgtcactattttggccaccgaggtggtggctcccgcgggagccagcctgcaagtgcaatgtccagtgctggtggatgcaaaaatttacgatagcgacggctatcatcccgactttttctacgacctcaacggcaccgccagttggagctctttgcctttcggcggtgccacaggcaccactgccgcaaccgcccgctcctttcagactaccaccatagctcctctcagctggataacctggacgatgaatgaagtggattggcaacctagcttcagggttgtcctccctgaaaccctcccgcctcgtcttcttgttaactccagcattctactggccatggaaaccaacatactcgccagcgagttgatctccgagtttcaacgagaagccgtgcaaacaactgctgctgtccatcagcacacgatatggctggatgaccaattccagcttgcggttcggtcttcccaacgccaagaccaattgcaaagccagcagatccgaaaccttcattttcgtgttcaatcactactcaagctacacagaatggattccaatgcacccctcgtagtaccccctctacaatacgagcaatacgataaacttatcaatctcatgactcaggctgcccagagttacgacaatgatttcaagaacctcaatcttttcatgcagcagaatgagatcctaggaaattttctcttggaccagaataaggcatttgcgcaaaaggaaagagacatggaggtgcatcattcacagcttgttggtttacaagatagagagctggagctaacaagagagaagtttgatagtttgctcataactcttgatcaacagaacagagagatggaaaaagctcaagctgatttggaagcaggtatcaaacagtatagggatagacagattgccttagcggtctttggtgcactcttagcggttgcacagctgtgttttgctgtcttcacgggtggcgctacggccggtgcggctgtggcaacagctgtccagcttagtgagactgcaaaagtattgcaatcagtggtgaaattgctgcagaggattgagaaggtagtgacaacactgtatgcttttattgactttttgtcagagatgcagagccttgaacagattgtaaatgcacctgaaatgccagagctaccaacagctgcagactggtatatctttgaaaatgaaatagtggctgttgcagagaccatgcctacagagatatcggaggtacctgtgtggaaggccaagtgcaagaatgttgccgcagttggtcgggaaatcatcaccactgctgtttatatgcagaagctacagtatgacttggctgtaaacaggatgctacaacaaatagcccaacaacaagcagagagattagagagcttgcagataaaagatctagacaactacttggagatggcaacagagctggatatgagaactacccggattcttatgggtttgctcaaggtgctgagcctacagacgggcgcattgtcataccattatctgctggagccgaggccgctcacgggatgggtacgaatggatgctgtgtggaatgcattattaaagaatgcgaccgacgcagtggtagcgctgtcgacgtcgggtgcatctaacgactttgtggtaaggtatacgattaaaggcataccggtgaatttgcttctggaaggaatggattggattttcgacattcctgtggatgaccccgccttcggggaatcacattggtcgcgtgtgcggattgagtatatagagatgaagttcgactcttcatcagatggccaccttcccaccaccacgggtgggcagatctacttccggctgcaggctggccgcttcttcgacgatcggctgggacatcagatccttcactacgaggctgcagtgccgcttgtctaccagtatgcctataggctcgcaagcggggaaaccactgtcagcaatcgtccctccctgtccagcagcactcattacatgcgcatgactcccttcacgcgatgggggctccgcctctccgcttctgctccagagaatcgagggcttgctttcccgaccgctacaactgaggatgccaccacccagatcaccctcaccttctacgttaccgccagacgccgaatcagcaatttttttcttcattag

SEQ ID NO: 907 - DNA, 2360 bp, Adiantum pedatum
atggacgtggactacgcggcaatctacaaggacgtgaaccaggtgacgaggacggtggcgaccagccagtgttcggaggtgatggccatccagaggctgtacgtgcggctgaacgacctggacgtgaagggcctgaggaacgtggaggtggtgaagcaagtggtggtgtttgcggacgtggtggaagtggagggcggcgacgtactggagttgcccggctccacccaaatcaccatcgtgtgccgcgtgctccacaccaagcacccttctggtgcagtcattcggctgtcctccttggcgcccgtgaagtgccgtgggcgagagcaccgtcacgcatccggcccgcgcacccactctgtcacgcccatgaacggacagctcgcctctgatggccaaatcgtcactattttggccaccgaggtggtggctcccgcgggagccagcctgcaagtgcaatgtccagtgctggtggatgcaacaatttacgatagcgacggctatcatcccgactttttctacgacctcaacggcaccgccagttggagctctttgcctttcggcggtgccacaggcaccactgccgcaaccgcccgctcctttcagactaccaccgtagctcctctcagctggataacctggacgatgaatgaagtggattggcaacctagcttcagggttgtcctccctgaaaccctcccgcctcgtcttcttgttaactccagcattctactggccatggaaaccaacatactcgccagcgagttgatctccgagtttcaacgagaagccgtgcaaacaactgctgctgtccatcagcacacgatatggctggatgaccaattccagcttgcggttcggtcttcccaacgccaagaccaattgcaaagccagcagagccgaaaccttcattttcgtgttcaatcactactcaagctagacagaatggattccaatgcacccctcgtagtaccccctctacaatacgagcaatacgataaacttatcaatctcatgactcaggctgcccagagttacgacaatgatttcaagaacctcaatcttttcatgcagcagaatgaggtatcaaacagtatagggatagacagattgccttagcggtctttggtgcactcttagcggttgcacagctgtgttttgctgtcttcacgggtggcgctacggccggtgcggctgtggcaacagctgtccagcttagtgagactgcaaaagtattgcaatcagtggtgaaattgctgcagaggattgagaaggtagtgacaacactgtatgcttttattgactttttgtcagagatgcagagccttgaacagattgtaaatgcacctgaaatgccagagctaccaacagctgcagactggtatatctttgaaaatgaaatagtggctgttgcagagaccatgcctacagagatatcggaggtacctgtgtggaaggccaagtgcaagaatgttgccgcagttggtcgggaaatcatcaccactgctgtttatatgcagaagctacagtatgacttggctgtaaacaggatgctacaacaaatagcccaacaacaagcagagagattagagagcttgcagataaaagatctagacaactacttggagatggcaacagagctggatatgagaactacccggattcttatgggtttgctcaaggtgctgagcctacagacgggcgcattgtcataccattatctgctggagccgaggccgctcacgggatgggtacgaatggatgctgtgtggaatgcattattaaagaatgcgaccgacgcagtggtagcgctgtcgacgtcgggtccatctaacgactttgtggtaaggtatacgattaaaggcataccggtgaatttgcttctggaaggaatggattggattttcgacattcctgtggatgaacccgccttcggggaatcacattggtcgcgtgtgcggattgagtatatagagatgaagttcgactcttcatcagatggccaccttcccaccaccacgggtgggcagatctacttccggctgcaggctggccgcttcttcgacgatcggctgggacatcagatccttcactacgaggctgcagtgccgcttgtctaccagtatgcctataggctcgcaagcggggaaaccactgtcagcaatcgtccctccctgtctagcagcactcattacatgcgcatgactcccttcacgcgatgggggctccgcctctccgcttctgctccagagaatcgagggcttgctttcccgaccgctacaactgaggatgccaccacccagatcaccctcaccttctacgttaccgccagacgccgaatcagcaatttttttcttcattag

SEQ ID NO: 908 - DNA, 2625 bp, Pteris cretica Roweri
atgtttactcaggatgatgactggtgcgtatatatgtactgcagtccgggtatattggatatggcggggcgcgaccacaacacggatgtgatcaactatgaggagatctacaaggccgtggatgaggtaaggaggacggtggtgccgagatccaaggatgcggtgatgatagtggagggcatgtatgtaaacctgaattcgcggattgatgatgggttgttcactggggatagttcgaaaccaaaggaggtgtgggtagtggcggacgtggtggcgctgtccaacgacgtcaaggtgcccacgtccacggagcggctggtcattctgtgtcgcatcctccacgttgatggcagttacgctaggttgttcagcgcttcgcaaaatgtcattctagattgtgattatatccaagaatctgaggcgatttccaaatcgtggaaggttcgatcgaccgagttacagatccacatctacgcgcaatgcttgcaagccccgtccagcaaagagctcatgccgctgtgcgtctcaattcctgctcatcgtaaatatcccttctttatttatgtgatgtggggcctttttggcatgttcgacagcggccgcggccgcatgatgcccgccttgagtttcccacgccatgaaaataatttcctgggccccctttttaggagtcgagaagagctcgagcagcttgagagattgttcgtggtctcactgtgtgacgagcagattcccgcggcattgctgagcgaggccgccattgtggaggccatgcaagccaccctcctcaaggctgagctcatcctcacctaccagacgcaggcccatggaggagccaccgcggagatggcaaggcagcacgtcgagtggcttcgttcccagctcaaggggtgcataagtagccagcaggaagggcaagtacagctggatgccggcttggctgccctgctcgtccgtgcagagagcctttcgaagatgccacaacgaactgcctacaatgtcgttcctagcttgacgtataaggcctatcgtgacctgattaacaggctggccacggcagccaaggactatgacaacagtttcatgcaaatgcggaccctcgtccaaagcagtcagatgaccgattcagatttcgagaccttgtacaaagcactcgcacagaaggagaaggatgtggatgaataccatcagcaactggcaaggctgaaacaaaacgagctgaaggaggtctcaagcagtctggatgtcctgaagtgcgaactggagaaacaaaagcaagcgatggacgaggctgagcaagatgctaatgatagactgaaagaatatgagatgaagcaagctgccaaagctgtgtttgaagtggtgaaggctgtgtttgccatgggggcagcggtgtttactgcgggcacaactgtaggagtagctctggagggtgtggaggaagcagtgaacgccagtggaaaaatgaaacaagccttggagctactagaaaagatcaacaagttactgaaagtcatggctgccatccagaagctcatcgactctctaaatcatctcaaggacgtgatcgaggcaccggagttgccaagcatgcccacggaggcagattgggacatatttgagaatgagattatggccgtggcaagccagctagagaaagccatcaatgtggccaattgggaagccaagtgcaagaatgtagcagcggtgggcaaggagttcatcaagaccgcaaatcgcatggggcagctgcaatacgaaatactggtgcaaaatttgcaaggtgaggtggctaggaggcacagggagcgtctggaggagatcatctccaagggcagagactacgacaagtatgaggagatagcaaggcacgttgagatgctgcggagcaatttgcacatcaggttactacatatcctggatctccagcgtgcggctgtgtactatcatttcctgctggaccaaacaccgttcaccgtgtgggtggacgtggacacggtgacagcaacactgatcgacaatgaggccgtcatactgacgaacctggacagtctgagcaagtgcagcgacaaaacaatcacttacagtgtggagggcataccagtaagtctgttggagagcggcggcgcttgggtctttagcatcgcggtcccgggatcagatcagagcggtcacaagggcttcaaagacttgagccgtgtgcgcattgagtacatgaccatcaagtttgctgctaattccgccaagccgcaaactcacgatgacgatgacactgacgacgacacggttctgttcttgatgcaagcagcgacagatttccaagaccgtaggaaggccgacaagaaagtgctacagtatgaggcggcggtgccattgcgctaccgatacgcctacaacttcagcactgaggaggagctggtagacaaccgccctagcaccagcggtggggtggaggatttctggatgcgcatgacgcccttcactacatggcgcctctctcttcctatctctgatccctacaatgaaggcctcaaatttgatgactcttctgcctccacaaccacgtccatacgcatcgtcttccatgtcagcgccattcgagacgagtcctatcttttcagatga

SEQ ID NO: 909 - DNA, 2719 bp, Pteris cretica Roweri
atgtttactcaggatgatgactggtgcgtatatatgtactgcagtccgggtatattggatatggcggggcgcgaccacaacacggatgtgatcaactatgaggagatctacaaggccgtggatgaggtaaggaggacggtggtgccgagatccaaggatgcggtgatgatagtggagggcatgtatgtaaacctgaattcgcggattgatgatgggttgttcactggggatagttcgaaaccaaaggaggtgtgggtagtggcggacgtggtggcgctgtccaacgacgtcaaggtgcccacgtccacggagcggctggtcattctgtgtcgcatcctccacgttgatggcagttacgctaggttgttcagcgcttcgcaaaatgtcattctagattgtgattatatccaagaatctgaggcgatttccaaatcgtggaaggttcgatcgaccgagttacagatccacatctacgcgcaatgcttgcaagccccgtccagcaaagagctcatgccgctgtgcgtctcaattcctgctcatcgtaaatatcccttctttatttatgtgatgtggggcctttttggcatgttcgacagcggccgcggccgcatgatgcccgccttgagtttcccacgccatgaaaataatttcctgggccccctttttaggagtcgagaagagctcgagcagcttgagagattgttcgtggtctcactgtgtgacgagcagattcccgcggcattgctgagcgaggccgccattgtggaggccatgcaagccaccctcctcaaggctgagctcatcctcacctaccagacgcaggcccatggaggagccaccgcggagatggcaaggcagcacgtcgagtggcttcgttcccagctcaaggggtgcataagtagccagcaggaagggcaagtacagctggatgccggcttggctgccctgctcgtccgtgcagagagcctttcgaagatgccacaacgaactgcctacaatgtcgttcctagcttgacgtataaggcctatcgtgacctgattaacaggctggccacggcagccaaggactatgacaacagtttcatgcaaatgcggaccctcgtccaaagcagtcagatgaccgattcagatttcgagaccttgtacaaagcactcgcacagaaggagaaggatgtggatgaataccatcagcaactggcaaggctgaaacaaaacgagctgaaggaggtctcaagcagtctggatgtcctgaagtgcgaactggagaaacaaaagcaagcgatggacgaggctgagcaagatgctaatgatagtaataagcacattgctgaatatgcaccactgcttgcactgaacaagctaatctcctacctgcaagagattaagttttagtaaacttattgcaggactgaaagaatatgagatgaagcaagctgccaaagctgtgtttgaagtggtgaaggctgtgtttgccatgggggcagcggtgtttactgcgggcacaactgtaggagtagctctggagggtgtggaggaagcagtgaacgccagtggaaaaatgaaacaagccttggagctactagaaaagatcaacaagttactgaaagtcatggctgccatccagaagctcatcgactctctaaatcatctcaaggacgtgatcgaggcaccggagttgccaagcatgcccacggaggcagattgggacatatttgagaatgagattatggccgtggcaagccagctagagaaagccatcaatgtggccaattgggaagccaagtgcaagaatgtagcagcggtgggcaaggagttcatcaagaccgcaaatcgcatggggcagctgcaatacgaaatactggtgcaaaatttgcaaggtgaggtggctaggaggcacagggagcgtctggaggagatcatctccaagggcagagactacgacaagtatgaggagatagcaaggcacgttgagatgctgcggagcaatttgcacatcaggttactacatatcctggatctccagcgtgcggctgtgtactatcatttcctgctggaccaaacaccgttcaccgtgtgggtggacgtggacacggtgacagcaacactgatcgacaatgaggccgtcatactgacgaacctggacagtctgagcaagtgcagcgacaaaacaatcacttacagtgtggagggcataccagtaagtctgttggagagcggcggcgcttgggtctttagcatcgcggtcccgggatcagatcagagcggtcacaagggcttcaaagacttgagccgtgtgcgcattgagtacatgaccatcaagtttgctgctaattccgccaagccgcaaactcacgatgacgatgacactgacgacgacacggttctgttcttgatgcaagcagcgacagatttccaagaccgtaggaaggccgacaagaaagtgctacagtatgaggcggcggtgccattgcgctaccgatacgcctacaacttcagcactgaggaggagctggtagacaaccgccctagcaccagcggtggggtggaggatttctggatgcgcatgacgcccttcactacatggcgcctctctcttcctatctctgatccctacaatgaaggcctcaaatttgatgactcttctgcctccacaaccacgtccatacgcatcgtcttccatgtcagcgccattcgagacgagtcctatcttttcagatga

SEQ ID NO: 910 - DNA, 2550 bp, Dryopteris marginalis
atggccgtcatggattacagcgagatttacagggatctgaaccagataagcatgggtgtggaccgggtagagttctcagaggtgatggtgatccacaggatgtacgtgaggttagctgatctggatgtgggggagctcgcgggagccgagagtgtgaagcgggtgtacgtgtttgcggatgtggtggagcttgcgccggggacgaggatgcaaatgccaggatcggtgacagtgatcatattgtgtcgtcttctgcaatttccaaccgatgggtcgcaagctgcaactctccagctgccgttcatgaagttgcatgccttactcagagagcgacatacgtcggagataacagcagcagatggcatgaattggggaacatacatacacggggaggaagtacaggtcatcataccatggtcaactgtaaattcaatacttcgagtttgggcagatggctctagtatgacctcatcctttcacaatgtgttcgacgaacctgggagaatagtttccactactgtatttacaaggcctggggcacccgacaatacgaccttgagtgcggaccccggcatgagcattcttaatagttttctacttcacacagtttccccttcggcattcagtgttttagctcgccaaagttccaatatatccttcacaaatattccagtagacgtggtgaccgatcctaacatcttgctgggcatccagaccaacgtgctcatcgcggagctagtccaggtctgtcacccgtcacctgaaatttttgctgctgtagctgagcacctgaattggctcaacaagatcatgctccaagttgtgaagaatgaaactcaattgcaagggaccgagtcctacaacgagtgcctcgcacttttgggtcgtattcaatctgtgataaagatagcgagacttggcttagtagtgccgcagttgcaatacagaatgtatagtagcctcatcaaccaaatggcccaagtagcacaaaactacgaccgagagttcaagcaattcaagcttttcattatccaaaatcaaatccttggtagctatttgttgcagcagaacagggtatttgctgacagggagcagcagatggagagtttccattcagtcgtcatttctcaaagaaaagaggagttggacagtgccactacaaaaatagagcgattgagtttgcaaatggaggcagagaatgacgcaatggagcaagccaaaaaggaaatggatgaaggattgcggaagtaccagaatgagcaagttgcaagggctgtcttttccgttctcagtgctatagctcagatcgggcttgcattcatcacgggcggtgcaacggctcctggagctgtggcgtcagcggcacaagctgtgagcatagcaggtcaggccgcacgagctcttgaaaaggtggtgaaaattttagagcagttggaggctgtgatggaggttgtgactgctgtgaaggagcttgtggattcattggaacagataggtcatattgtggaggcaccggtgatgccggagatgccctcagaggcggactggtccatttttgtgaatgagatcgaggcagtggcagagcagatgccgacggaagtcgcagaggtgccggcgtggaaggccaagtgcaagaatgttgctgcattgggtcgggagatgagcatcacggctgcccacatttctcagctccagtacgacatatgggtgcaaggcatgctgcgggaaatcgctcaaagccaggctgacaagctagcggcaattcaacccgtggaccttaccaactatttggaaatggtaacacagatggatatgcggacttcaaggatgctgctagggctcatcaacatacttcgcattcagaatgcagcgctcatgtacgagtaccttctcacaccgacgcagctcacagcatggccattggccatggatactgtggggaccttgcttatccagcaggagagttctgcactgataggattagctcagctaggccccccgtccgattacacgagcacgcacgtggtgaaagacatacctgtgagcttgctgcttgatggtgatgattgggagttcgagatccctgtgcaagatggcaccacctttccttccagctggtctcgcgtccgcattcggcacctggagatgcactttgtgcaggctggcggtgacgagcagccgcagattatccaccagcccgccacccaaactggctccgtttacatcctcctgcagggctccactatcttccatgaccgcagaagggatgaggtgatgacctttgaggcagctgttcctctcaactaccattacgggtaccgcctcgacactggcgaaaccactgttacgaatgtaccctcagaacattttgccaacacattcatgcagatgacacccttcactcgctggagacttcgtctctctgcgtccgccgcagagaatgcaggattagcctttcccacagctacagctccggactccactacccagattgtcatcactttccatgtttcggccattaggcaaattgattggcggcacgacgagtag

SEQ ID NO: 911 - DNA, 2550 bp, Dryopteris marginalis
atggccgtcatggattacagcgagatttacagggatctgaaccagataagcatgggtgtggaccgggtagagttctcagaggtgatggtgatccacaggatgtacgtgaggttagctgatctggatgtgggggagctcgcgggagccgagagtgtgaagcgggtgtacgtgtttgcggatgtggtggagcttgcgccggggacgaggatgcaaatgccaggatcggtgacagtgatcatattgtgtcgtcttctgcaatttccaaccgatgggtcgcaagctgcaactctccagctgccgttcatgaagttgcatgccttactcagagagcgacatacgtcggagataacagcagcagatggcatgaattggggaacatacatacacggggaggaagtacaggtcatcataccatggtcaactgtaaattcaatacttcgagtttgggcagatggctctagtatgacctcatcctttcacaatgtgttcgacgaacctgggagaatagtttccactactgtatttacaaggcctggggcacccgacaatacgaccttgagtgcggaacccggcatgagcattcttaatagttttctacttcacacagtttccccttcggcattcagtgttttagctcgccaaagttccaatatatccttcacaaatattccagtagacgtggtgaccgatcctaacatcttgctgggcatccagaccaacgtgctcatcgcggagctagtccaggtctgtcacccgtcacctgaaatttttgctgctgtagctgagcacctgaattggctcaacaagatcatgctccaagttgtgaagaatgaaactcaattgcaagggaccgagtcctacaacgagtgcctcgcacttttgggtcgtattcaatctgtgataaagatagcgagacttggcttagtagtgccgcagttgcaatacagaatgtatagtagcctcatcaaccaaatggcccaagtagcacaaaactacgaccgagagttcaagcaattcaagcttttcattatccaaaatcaaatccttggtagctatttgttgcagcagaacagggtatttgctgacagggagcagcagatggagagtttccattcagtcgtcatttctcaaagaaaagaggagttggacagtgccactacaaaaatagagcgattgagtttgcaaatggaggcagagaatgacgcaatggagcaagccaaaaaggaaatggatgaaggattgcggaagtaccagaatgagcaagttgcaagggctgtcttttccgttctcagtgctatagctcagatcgggcttgcattcatcacgggcggtgcaacggctcctggagctgtggcgtcagcggcacaagctgtgagcatagcaggtcaggccgcacgagctcttgaaaaggtggtgaaaattttagagcagttggaggctgtgatggaggttgtgactgctgtgaaggagcttgtggattcattggaacagataggtcatattgtggaggcaccggtgatgccggagatgccctcagaggcggactggtccatttttgtgaatgagatcgaggcagtggcagagcagatgccgacggaagtcgcagaggtgccggcgtggaaggccaagtgcaagaatgttgctgcattgggtcgggagatgagcatcacggctgcccacatttctcagctccagtacgacatatgggtgcaaggaatgctgcgggaaatcgctcaaagccaggctgacaagctagcggcgattcaacccgtggaccttaccaactatttggaaatggtaacacagatggatatgcggacttcaaggatgctgctagggctcatcaacatacttcgcattcagaatgcagcgctcatgtacgagtaccttctcacaccgacgcagctcacagcatggccgttggccatggatactgtggggaccttgcttatccagcaggagagttctgcactgataggattagctcagctaggccccccgtccgattacacgagcacgcacgtggtgaaagacatacctgtgagcttgctgcttgatggtgatgattgggagttcgagatccctgtgcaagatggcaccacctttccttccagctggtctcgcgtccgcattcggcacctggagatgcactttgtgcaggctggcggtgacgagcagcagcagattatccaccagcccgccacccaaactggctccgtttacatcctcctgcagggctccactatcttccatgaccgcagaagggatgaggtgatgacctttgaggcagctgttcctctcaactaccattacgggtaccgcctcgacactggcgaaaccactgttacgaatgtaccctcagaacattttgccaacacattcatgcagatgacacccttcactcgctggagacttcgtctctctgcgtccgccgcagagaatgcaggattagcctttcccacagctacagctccggactccactacccagattgtcatcactttccatgtttcggccattaggcaaattgattggcggcacgacgagtag

SEQ ID NO: 912 - DNA, 2550 bp, Dryopteris marginalis
atggccgtcatggattacagcgagatttacagggatctgaaccagataagcatgggtgtggaccgggtagagttctcagaggtgatggtgatccacaggatgtacgtgaggttagctgatctggatgtgggggagctcgcgggagccgagagtgtgaagcgggtgtacgtgtttgcggatgtggtggagcttgcgccggggacgaggatgcaaatgccaggatcggtgacagtgatcatattgtgtcgtcttctgcaatttccaaccgatgggtcgcaagctgcaactctccagctgccgttcatgaagttgcatgccttactcagagagcgacatacgtcggagataacagcagcagatggcatgaattggggaacatacatacacggggaggaagtacaggtcatcataccatggtcaactgtaaattcaatacttcgagtttgggcagatggctctagtatgacctcatcctttcacaatgtgttcgacgaacctgggagaatagtttccactactgtatttacaaggcctggggcacccgacaatacgaccttgagtgcggaacccggcatgagcattcttaatagttttctacttcacacagtttccccttcggcattcagtgttttagctcgccaaagttccaatatatccttcacaaatattccagtagacgtggtgaccgatcctaacatcttgctgggcatccagaccaacgtgctcatcgcggagctagtccaggtctgtcacccgtcacctgaaatttttgctgctgtagctgagcacctgaattggctcaacaagatcatgctccaagttgtgaagaatgaaactcaattgcaagggaccgagtcctacaacgagtgcctcgcacttttgggtcgtattcaatctgtgataaagatagcgagacttggcttagtagtgccgcagttgcaatacagaatgtatagtagcctcatcaaccaaatggcccaagtagcacaaaactacgaccgagagttcaagcaattcaagcttttcattatccaaaatcaaatccttggtagctatttgttgcagcagaacagggtatttgctgacagggagcagcagatggagagtttccattcagtcgtcatttctcaaagaaaagaggagttggacagtgccactacaaaaatagagcgattgagtttgcaaatggaggcagagaatgacgcaatggagcaagccaaaaaggaaatggatgaaggattgcggaagtaccagaatgagcaagttgcaagggctgtcttttccgttctcagtgctatagctcagatcgggcttgcattcatcacgggcggtgcaacggctcctggagctgtggcgtcagcggcacaagctgtgagcatagcaggtcaggccgcacgagctcttgaaaaggtggtgaaaattttagagcagttggaggctgtgatggaggttgtgactgctgtgaaggagcttgtggattcattggaacagataggtcatattgtggaggcaccggtgatgccggagatgccctcagaggcggactggtccatttttgtgaatgagatcgaggcagtggcagagcagatgccgacggaagtcgcagaggtgccggcgtggaaggccaagtgcaagaatgttgctgcattgggtcgggagatgagcatcacggctgcccacatttctcagctccagtacgacatatgggtgcaaggcatgctgcgggaaatcgctcaaagccaggctgacaagctagcggcaattcaacccgtggaccttaccaactatttggaaatggtaacacagatggatatgcggacttcaaggatgctgctagggctcatcaacatacttcgcattcagaatgcagcgctcatgtacgagtaccttctcacaccgacgcagctcacagcatggccattggccatggatactgtggggaccttgcttatccagcaggagagttctgcactgataggattagctcagctaggccccccgtccgattacacgagcacgcacgtggtgaaagacatacctgtgagcttgctgcttgatggtgatgattgggagttcgagatccctgtgcaagatggcaccacctttccttccagctggtctcgcgtccgcattcggcacctggagatgcactttgtgcaggctggcggtgacgagcagccgcagattatccaccagcccgccacccaaactggctccgtttacatcctcctgcagggctccactatcttccatgaccgcagaagggatgaggtgatgacctttgaggcagctgttcctctcaactaccattacgggtaccgcctcgacactggcgaaaccactgttacgaatgtaccctcagaacattttgccaacacattcatgcagatgacacccttcactcgctggagacttcgtctctctgcgtccgccgcagagaatgcaggattagcctttcccacagctacagctccggactccactacccagattgtcatcactttccatgttttggccattaggcaaattgattggcggcacgacgagtag

SEQ ID NO: 913 - DNA, 2550 bp, Dryopteris marginalis
atggccgtcatggattacagcgagatttacagggatctgaaccagataagcatgggtgtggaccgggtagagttctcagaggtgatggtgatccacaggatgtacgtgaggttagctgatctggatgtgggggagctcgcgggagccgagagtgtgaagcgggtgtacgtgtttgcggatgtggtggagcttgcgccggggacgaggatgcaaatgccaggatcggtgacagtgatcatattgtgtcgtcttctgcaatttccaaccgatgggtcgcaagctgcaactctccagctgccgttcatgaagttgcatgccttactcagagagcgacatacgtcggagataacagcagcagatggcatgaattggggaacatacatacacggggaggaagtacaggtcatcataccatggtcaactgtaaattcaatacttcgagtttgggcagatggctctagtatgacctcatcctttcacaatgtgttcgacgaacctgggagaatagtttccactactgtatttacaaggcctggggcacccgacaatacgaccttgagtgcggaccccggcatgagcattcttaatagttttctacttcacacagtttccccttcggcattcagtgttttagctcgccaaagttccaatatatccttcacaaatattccagtagacgtggtgaccgatcctaacatcttgctgggcatccagaccaacgtgctcatcgcggagctagtccaggtctgtcacccgtcacctgaaatttttgctgctgtagctgagcacctgaattggctcaacaagatcatgctccaagttgtgaagaatgaaactcaattgcaagggaccgagtcctacaacgagtgcctcgcacttttgggtcgtattcaatctgtgataaagatagcgagacttggcttagtagtgccgcagttgcaatacagaatgtatagtagcctcatcaaccaaatggcccaagtagcacaaaactacgaccgagagttcaagcaattcaagcttttcattatccaaaatcaaatccttggtagctatttgttgcagcagaacagggtatttgctgacagggagcagcagatggagagtttccattcagtcgtcatttctcaaagaaaagaggagttggacagtgccactacaaaaatagagcgattgagtttgcaaatggaggcagagaatgacgcaatggagcaagccaaaaaggaaatggatgaaggattgcggaagtaccagaatgagcaagttgcaagggctgtcttttccgttctcagtgctatagctcagatcgggcttgcattcatcacgggcggtgcaacggctcctggagctgtggcgtcagcggcacaagctgtgagcatagcaggtcaggccgcacgagctcttgaaaaggtggtgaaaattttagagcagttggaggctgtgatggaggttgtgactgctgtgaaggagcttgtggattcattggaacagataggtcatattgtggaggcaccggtgatgccggagatgccctcagaggcggactggtccatttttgtgaatgagatcgaggcagtggcagagcagatgccgacggaagtcgcagaggtgccggcgtggaaggccaagtgcaagaatgttgctgcattgggtcgggagatgagcatcacggctgcccacatttctcagctccagtacgacatatgggtgcaaggcatgctgcgggaaatcgctcaaagccaggctgacaagctagcggcaattcaacccgtggaccttaccaactatttggaaatggtaacacagatggatatgcggacttcaaggatgctgctagggctcatcaacatacttcgcattcagaatgcagcgctcatgtacgagtaccttctcacaccgacgcagctcacagcatggccattggccatggatactgtggggaccttgcttatccagcaggagagttctgcactgataggattagctcagctaggccccccgtccgattacacgagcacgcacgtggtgaaagacatacctgtgagcttgctgcttgatggtgatgattgggagttcgagatccctgtgcaagatggcaccacctttccttccagctggtctcgcgtccgcattcggcacctggagatgcactttgtgcaggctggcggtgacgagcagccgcagattatccaccagcccgccacccaaactggctccgtttacatcctcctgcagggctccactatcttccatgaccgcagaagggatgaggtgatgacctttgaggcagctgttcctctcaactaccattacgggtaccgcctcgacactggcgaaaccactgttacgaatgtaccctcagaacattttgccaacacattcatgcagatgacacccttcactcgctggagacttcgtctctctgcgtccgccgcagagaatgcaggattagcctttcccacagctacagctccggactccactacccagattgtcatcactttccatgttttggccattaggcaaattgattggcggcacgacgagtag

SEQ ID NO: 914 - DNA, 2550 bp, Dryopteris intermedia
atggccgtcatggattacagtgagatttacaggcatctgaaccagataagcatggatgtggaccgggtagagttctcagaggtgatggtgatccacaggatgtacgtgaggttagctgatctggatgtgggggagctcgtgggagccgagagtgtgaagcgggtgtacgtgtttgcggatgtggtggagcttgcgccggggacaaggatgcaaatgccaggatcggtgacagtgatcatattgtgtcgtcttctgcaatttccaaccgatgggtcgcaagctgcaactctccagctgccattcatgaagttgcatgccttactcagagagcgatttacgtcggagataacagcagcagatggcatgaattggggaacgtacatacacggggatgaagtacaggtcatcataccatggtcaactgtaaattcaatacttcgagtttgggcagacagctctagtatgacctcatcctttcacaatgtgttcgacgaacctgggagaatagtttccactacttcatttacaaggcctggggcacccgacaatacgaccttgagtgcgcatcccggcatgagcgttcttaatagttttctactttacacagtttccccttcggcattcagtgttttagatcgccaaagttccaatatatccttcacaaatattccagtagacgtgatgaccgatcctaacatcttgctgggcatccagaccaatgtgctcatcgcggagctagtccaggtctgtcacccgtcacctgaaatttttgctgctgtagctgagcacctgaattggctcaacaagatcatgctccaagttgtgaagaatgaaactcaattgcaagggaccgagtcctacaacgagtgcctcgcacttttgggtcgtattcaatctgtgataaagatagcgagacttggcttagtagtgccgcagttgcaatacagaatgtatagtagcctcatcaaccaaatggcccaaatagctcaaaactacgaccgagatttcaggcaattcaagcttttcattatccaaaatcaaatccttggtagctatttgttgcagcagaacagggtatttgctgacagggagcagcagatggagagttttcattcagtcgtcatttctcaaagaaaagaggagttggacaatgccactacaaaaatagagcgattgagtttgcaaatggaggcagagaatggcgcaatggagcaagccaaaaaggaaatggatgaaggattgcggaagtaccagaatgagcaagttgcaagggctgtcttttccgttctcagtgctatagctcagatcgggcttgcattcatcacgggcggtgcaacggctcctggagctgtggcgtcagcggcgcaagctgtgagcatagcaggtcaggccgcacgagctcttgaaaaggtggtgaaaattttagagcagttggaggctgtgatggaggttgtgactgctgtgaaggagcttgtggattcattggaacagataggtcatattgtggaggcaccggtgatgccagagatgccctcagaggcggactggtccatttttgtgaacgagatcgaggcagtggcagagcagatgccgacggaagtcgcagaggtgccggcgtggaaggccaagtgcaagaatgttgctgcattgggtcgggagatgagcatcacggcagcatacatttctcagctccagtacgacatatgggtgcaaggcatgctgcgggaaatcgctcaaagccaggctgacaagctggcggcgattcaacccgtggaccttaccaactatttggaaatggtaacacagatggatatgcggacttcaaggatgctgctagggctcgtcaacatacttcgcattcagaatgcagcgctcatgtacgagtaccttctcacaccgacgcagctcacagcatggccattgtccatggatactgtggggaccttgcttatccagcaggagagttctgcactgataggattagctcagctaggccccccctctgattacacgagcacgcacgtggtgaaagacatacctgtgagcttgctgcttgatggtggtgattgggagttcgagatccctgtgcaagatggcaccacctttccttccagctggtctcgcgtccgcattcggcacttggagatgcactttgtgcaggccagcggtgacgagcagcagcagattatccaccagcccgccactcaaactggctccgtttacatcctcctgcagggctccactatcttccatgaccgcagaagagatgaggtgatgacctttgaggcagctgttcctctcaactaccattacgggtaccgcctcgacactggcgaaaccactgttacaaatgtaccctcggaacattttgccaacacattcatgcagatgacacccttcactcgctggagacttcgtctctctgcatctgctgcagagaatgcaggattagcctttcccacagcaacagctccggactccactacccagattgtcatcactttccatgtttcggccattaggcaaattgattggcggcacgacgagtag

SEQ ID NO: 915 - DNA, 2550 bp, Dryopteris intermedia
atggccgtcatggattacagcgagctttacagggatctgaaccagataagcatgggtgtggaccgggtagagttctcagaggtgatggtgatccacaggatgtacgtgaggttagctgatcttgatgtaggggagctcgtgggagccgagagagtgaagcgggtgtacgtgtttgcggatgtggtggagcttgcgccggggccaaagatgcaaatgccaggatcggtgacagtcatcatattgtgtcgtcttctgcaatttccaaccaataggtcgcaagccgcaactctccagctgccgttcatgaagttgcgtgcctttctcagagaggagaataggtcggagataacagcagccgatggcatgaattggggaacgtacatacacggggaggaagtacaggtcttcataccatcatcaactgtaaattcaatacttacagtttgggcagacggctctattataacttcatcctttcacaatgtgttcgacgaacctgggagaatagtttccactactgtatttacaagtcctggggcacccgacaatacgaccatgcgcgcggaacccggcatgagcagtcttaattggtttctacttcgcacagtttccccttcggcattcagtgtcttagctcgccaaagttcgaatatatccttcacaaatattccagtagacgtggtgaccgatcctaacatcctgctgggcatccagaccaatgtgctcattgcggagctagtccaggtctgtcacccgtcacctgacatttttgcggctgtagccgagcacctgaattggctcaacaagatcttgctccaagttgtgaagaatgaaactcaattgcaagggaccgagtcctacaacgagtgcctcgcacttttgggtcgtattcaatctgtgatgaagatagtgagacctggcttagtagtgccgcagttgcaatacagaatgtatagtagcctcatcaaccaaatggcccaagtagcacaaaactacgaccgagatttcaagcaattcaagcttttcatcatccaaaatcaaatccttggtagctatttgttgcagcagaacagggtatttgctgacagggagcagcagatggagagttttcattcagtcgtcatttctcaaagaaaagaggagttggacagtaccactacaaaaatagagcgattgagtttgcaaatggaggcagagaatggcgcaatggagcaagccaaaaaggaaatggatgaaggattgcggaagtatcagaatgagcaagttgcaagggccgtctttgccgttctcagcgctgtagctcagatcgggcttgcattcatcacgggaggtgcaacggctcctggagctgtggcgtcagcgggacaagctgtgagcatagcaggtcaggcggcacaagctctggaaaaggtggtgaaaattttagagcggttggaggctgtgatggaggttgtgactgctgtgaaggagctggtggattcattggaacagataggtcttattgtggaggcaccggtgatgccggagatgccctcagaggcggactggtccatttttgtgaacgagatcgaggcagtggcagagcagatgccgacagaagtcgcagaggtgccggcatggaaggccaagtgcaagaatgttgctgcattgggtcgggagatgagcatcacggcagcatacatttctcagctccagtacgacatatgggtgcaaggcatgctgcgggaaatcgctcaaagccaggctgacaagctggcggcgattcaacccgtggaccttaccaactatttggaaatggcaacacagatggatatgcggacttcaaggatgctgctagggctcatcaacatgcttcgcattcagaatgcagcgctcatgtacgagtaccttctcacaccgacgcagctcacagcatggccagtgaccatggataccgtggggaccttgcttatccagcaggagaattctgcactgataggattagctcagctaggccccccatccgattacacgagcacgcacgtggtgaaagacatacctgtgagcttgctgcttgatggtgctgattgggagttcgagatccctgtgcaagatggcaccacctttccttccagctggtctcgcgtccgcattcggcacctggagatgcactttgtgcaggccagcggtgacgagcagcagcagattatccaccagcccgccacccaaactggctccgtttacatcctcctgcagggctccactatcttccatgaccggagaagagacgaggtgatgaccttcgaggcagctgttcctctcaactaccattatgggtaccgccttgacactggcgaaaccactgttacgaatgtaccctcggaacattttgccaacacattcatgcagatgacacccttcactcgctggagacttcgtctctctgcgtccgccccagagaatgcagggttagcctttcccacagctacagctctggactccactacccagattgtcatcactttccatgtttcggccattaggcaaattgattggcggcacgacgagtag

SEQ ID NO: 916 - DNA, 2550 bp, Dryopteris intermedia
atggccgtcatggattacagcgagctttacagggatctgaaccagataagcatgggtgtggaccgggtagagttctcagaggtgatggtgatccacaggatgtacgtgaggttagctgatcttgatgtaggggagctcgtgggagccgagagagtgaagcgggtgtacgtgtttgcggatgtggtggagcttgcgccggggccaaagatgcaaatgccaggatcggtgacagtcatcatattgtgtcgtcttctgcaatttccaaccaataggtcgcaagccgcaactctccagctgccgttcatgaagttgcgtgcctttctcagagaggagaataggtcggagataacagcagccgatggcatgaattggggaacgtacatacacggggaggaagtacaggtcttcataccatcatcaactgtaaattcaatacttacagtttgggcagacggctctattataacttcatcctttcacaatgtgttcgacgaacctgggagaatagtttccactactgtatttacaagtcctggggcacccgacaatacgaccatgcgcgcggaacccggcatgagcagtcttaattggtttctacttcgcacagtttccccttcggcattcagtgtcttagctcgccaaagttcgaatatatccttcacaaatattccagtagacgtggtgaccgatcctaacatcctgctgggcatccagaccaatgtgctcattgcggagctagtccaggtctgtcacccgtcacctgacatttttgcggctgtagccgagcacctgaattggctcaacaagatcttgctccaagttgtgaagaatgaaactcaattgcaagggaccgagtcctacaacgagtgcctcgcacttttgggtcgtattcaatctgtgataaagatagcgagacttggcttagtagtgccgcagttgcaatacagaatgtatagtagcctcatcaaccaaatggcccaaatagctcaaaactacgaccgagatttcaggcaattcaagcttttcattatccaaaatcaaatccttggtagctatttgttgcagcagaacagggtatttgctgacagggagcagcagatggagagttttcattcagtcgtcatttctcaaagaaaagaggagttggacaatgccactacaaaaatagagcgattgagtttgcaaatggaggcagagaatggcgcaatggagcaagccaaaaaggaaatggatgaaggattgcggaagtaccagaatgagcaagttgcaagggctgtcttttccgttctcagtgctatagctcagatcgggcttgcattcatcacgggcggtgcaacggctcctggagctgtggcgtcagcggcgcaagctgtgagcatagcaggtcaggccgcacgagctcttgaaaaggtggtgaaaattttagagcagttggaggctgtgatggaggttgtgactgctgtgaaggagcttgtggattcattggaacagataggtcatattgtggaggcaccggtgatgccagagatgccctcagaggcggactggtccatttttgtgaacgagatcgaggcagtggcagagcagatgccgacggaagtcgcagaggtgccggcgtggaaggccaagtgcaagaatgttgctgcattgggtcgggagatgagcatcacggcagcatacatttctcagctccagtacgacatatgggtgcaaggcatgctgcgggaaatcgctcaaagccaggctgacaagctggcggcgattcaacccgtggaccttaccaactatttggaaatggtaacacagatggatatgcggacttcaaggatgctgctagggctcgtcaacatacttcgcattcagaatgcagcgctcatgtacgagtaccttctcacaccgacgcagctcacagcatggccattgtccatggatactgtggggaccttgcttatccagcaggagagttctgcactgataggattagctcagctaggccccccctctgattacacgagcacgcacgtggtgaaagacatacctgtgagcttgctgcttgatggtgctgattgggagttcgagatccctgtgcaagatggcaccacctttccttccagctggtctcgcgtccgcattcggcacttggagatgcactttgtgcaggccagcggtgacgagcagcagcagattatccaccagcccgccactcaaactggctccgtttacatcctcctgcagggctccactatcttccatgaccgcagaagagatgaggtgatgacctttgaggcagctgttcctctcaactaccattacgggtaccgcctcgacactggcgaaaccactgttacaaatgtaccctcggaacattttgccaacacattcatgcagatgacacccttcactcgctggagacttcgtctctctgcatctgctgcagagaatgcaggattagcctttcccacagcaacagctccggactccactacccagattgtcatcactttccatgtttcggccattaggcaaattgattggcggcacgacgagtag

SEQ ID NO: 917 - DNA, 2550 bp, Dryopteris intermedia
atggccgtcatggattacagtgagatttacaggcatctgaaccagataagcatggatgtggaccgggtagagttctcagaggtgatggtgatccacaggatgtacgtgaggttagctgatctggatgtgggggagctcgtgggagccgagagtgtgaagcgggtgtacgtgtttgcggatgtggtggagcttgcgccggggacaaggatgcaaatgccaggatcggtgacagtgatcatattgtgtcgtcttctgcaatttccaaccgatgggtcgcaagctgcaactctccagctgccattcatgaagttgcatgccttactcagagagcgatttacgtcggagataacagcagcagatggcatgaattggggaacgtacatacacggggatgaagtacaggtcatcataccatggtcaactgtaaattcaatacttcgagtttgggcagacagctctagtatgacctcatcctttcacaatgtgttcgacgaacctgggagaatagtttccactacttcatttacaaggcctgggtcacccgacaatacgaccttgagtgcgcatcccggcatgagcgttcttaatagttttctactttacacagtttccccttcggcattcagtgttttagatcgccaaagttccaatatatccttcacaaatattccagtagacgtgatgaccgatcctaacatcttgctgggcatccagaccaatgtgctcatcgcggagctagtccaggtctgtcacccgtcacctgaaatttttgctgctgtagctgagcacctgaattggctcaacaagatcatgctccaagttgtgaagaatgaaactcaattgcaagggaccgagtcctacaacgagtgcctcgcacttttgggtcgtattcaatctgtgataaagatagcgagacttggcttagtagtgccgcagttgcaatacagaatgtatagtagcctcatcaaccaaatggcccaaatagctcaaaactacgaccgagatttcaggcaattcaagcttttcattatccaaaatcaaatccttggtagctatttgttgcagcagaacagggtatttgctgacagggagcagcagatggagagttttcattcagtcgtcatttctcaaagaaaagaggagttggacaatgccactacaaaaatagagcgattgagtttgcaaatggaggcagagaatggcgcaatggagcaagccaaaaaggaaatggatgaaggattgcggaagtaccagaatgagcaagttgcaagggctgtcttttccgttctcagtgctatagctcagatcgggcttgcattcatcacgggcggtgcaacggctcctggagctgtggcgtcagcggcgcaagctgtgagcatagcaggtcaggccgcacgagctcttgaaaaggtggtgaaaattttagagcagttggaggctgtgatggaggttgtgactgctgtgaaggagcttgtggattcattggaacagataggtcatattgtggaggcaccggtgatgccagagatgccctcagaggcggactggtccatttttgtgaacgagatcgaggcagtggcagagcagatgccgacggaagtcgcagaggtgccggcgtggaaggccaagtgcaagaatgttgctgcattgggtcgggagatgagcatcacggcagcatacatttctcagctccagtacgacatatgggtgcaaggcatgctgcgggaaatcgctcaaagccaggctgacaagctggcggcgattcaacccgtggaccttaccaactatttggaaatggtaacacagatggatatgcggacttcaaggatgctgctagggctcgtcaacatacttcgcattcagaatgcagcgctcatgtacgagtaccttctcacaccgacgcagctcacagcatggccattgtccatggatactgtggggaccttgcttatccagcaggagagttctgcactgataggattagctcagctaggccccccctctgattacacgagcacgcacgtggtgaaagacatacctgtgagcttgctgcttgatggtggtgattgggagttcgagatccctgtgcaagatggcaccacctttccttccagctggtctcgcgtccgcattcggcacttggagatgcactttgtgcaggccagcggtgacgagcagcagcagattatccaccagcccgccactcaaactggctccgtttacatcctcctgcagggctccactatcttccatgaccgcagaagagatgaggtgatgacctttgaggcagctgttcctctcaactaccattacgggtaccgcctcgacactggcgaaaccactgttacaaatgtaccctcggaacattttgccaacacattcatgcagatgacacccttcactcgctggagacttcgtctctctgcatctgctgcagagaatgcaggattagcctttcccacagcaacagctccggactccactacccagattgtcatcactttccatgtttcggccattaggcaaattgattggcggcacgacgagtag

SEQ ID NO: 918 - DNA, 2433 bp, Deparia acrostichoides
atggccgacatcgattacagtgtgctgtacaaggatgtgaaccagatcagcatcaggctagagaagatggacttctcggaggtgatggcagtgcatcgtatgttcgtccggatggacgatctggatgtgagctccggcaccggactgttggtgggagcggagaaggtgaagcgcctgtatgtgtttgcggatgtggtagagctaccgtccaaacaagtgcggctgccgggctccgacatgatcgtcatactgtgccgcatctttgtccgaaatggccgccataacatggagctgtttctgccttccatgaacatgagcatggtcgcagctggcaacgggagcattcggggagcgaacctgaccactacaatgttgtcatcgtcatccaatgctttgcagttcaagcttcaaagcggttcaatgacatcggctgtgcggctcaaagatgtggatgtagctgccgcactcacctgcgatgtgcaggctgcgtcggcgtcgatgcccctaactgtcatgacaaccggcacgtcgcctggcaacatctgggttcttggcatgactacagccatcgtcgttccagagagtgccgtggctgtcatcactgatgccaatattctgttgggcatgcaggtcaccgtgctcattgctgagctagtcaagactgcccacaactcagatgttgtcatagctgctatcactaggcatgtggaatggttgaaccacctcttggttcaggcgcatgcagctgcccccaatgaggacattgtcgcactcttatatcgtacacaagctttcattaaactgcaaagagaaggcttagtagttccgcggttgcaatatcgcatgtacaaaaacctcattgatcgaatggtgcaagtagctcagaactatgaccaagacttcaagcaattgaaactgtatctggagcaaaataaaatacttgggagctatttgttagagcaaaacaaggcgttcgctgcaaaggaaaaggatatggatgcttttcactcccaaatcattgctctaaggacgactgagctaaataacaccattgagaggatggatgcgttaagcaaacaaatggatgaagagaatgcagcaatggagcaagccaaaaaggacatggatgcaggcctggtagagtaccaaaacaaacaagttgcaaatgccctctttgctgtcttgggtgccattgctagtattggtctggcatttgcgactggtggggcaactgctcccggagctgtggctgctgcaggagcagccgtgaccgcggctgggaaggcagctgagggattgaagaaagtactagagattcttgaaggcttacaagtggtgatggaggttgtggctgccataaaagagctggtagaatctctacaggggatagggcagctagtggatgcccctgagatgccagatctgccttcgaatgcggattgggagatttttgtgaatgaagtggaggcagtggcagagcagatgccaacagaggtgacacaggtgcctgcctggaaggccaagtgcaagaatgtggcagctttaggccgagagatgagcacaatggcggcacacattgcagagctgcagtaccagatacaggtccaagagatgttgcgcgagatcgcacaaaagcaggcagataggctgtcttccatcacgcccgcagacttgacgaactacctggagatggtgtcacaaatggacatgcgaacaactcgcatgttgttggagctgattcgagtgctatacatccagaatgcagcattgcagtatgagtatctacagacacccgccccattgagcgcatggcctgtggacatgcaaacggtgtgggccttgcttgtacaacaagagactacggccattactgggttgctggagctgggggcgccttctgacttcacacaagaatatgtagtgaaagatatccctgtgcgcttgttgctagagggacaagactgggagtttgagctgccagttatgaatgcagatttcccctccacttggtctcgagtgcgcatccaccatgtggacatgcaatttgatgctgcaggcacgcctgatgtgcatgtacccacaaccaagagtggagaggtgtacatgctcctccaaagttctcgcttcttcgatgaccgtgccaagcgtgaaaatgagtttatcagctatcaggcaggcacgggcctattctaccagtatgcctaccgcctggccaccggcgaggccaccgtcaccaacatccccactgaggagtatgccaatactttcatgcgcctcgcacccttcacgcgttggcgacttcgtctctcttcctctgctgtcgaaaaccagggtatcgcatttcccacagccacatctgcagatgacaccacccaaatcaaaatcaccttctatgtctctgctattaggcgtataagcacgagaacaatataa

SEQ ID NO: 919 - DNA, 2433 bp, Deparia acrostichoides
atggccgacatcgattacagtgtgctgtacaaggatgtgaaccagatcagcatcaggctagagaagatggacttctcggaggtgatggcagtgcatcgtatgttcgtccggatggacgatctggatgtgagctccggcaccggactgttggtgggagcggagaaggtgaagcgcctgtatgtgtttgcggatgtggtagagctaccgtccaaacaagtgcggctgccgggctccgacatgatcgtcatactgtgccgcatctttgtccgaaatggccgccataacatggagctgtttctgccttccatgaacatgagcatggtcgcagctggcaacgggagcattcggggagcgaacctgaccactacaatgttgtcatcgtcatccaatgctttgcagttcaagcttcaaagcggttcaatgacatcggctgtgcggctcaaagatgtggatgtagctgccgcactcacctgcgatgtgcaggctgcgtcggcgtcgatgcccctaactgtcatgacaaccggcacgtcgcctggcaacatctgggttcttggcatgactacagccatcgtcgttccagagagtgccgtggctgtcatcactgatgccaatattctgttgggcatgcaggtcaccgtgctcattgctgagctagtcaagactgcccacaactcagatgttgtcatagctgctatcactaggcatgtggaatggttgaaccacctcttggttcaggcgcatgcagctgcccccaatgaggacattgtcgcactcttatatcgtacacaagctttcattaaactgcaaagagaaggcttagtagttccgcggttgcaatatcgcatgtacaaaaacctcattgatcgaatggtgcaagtagctcagaactatgaccaagacttcaagcaattgaaactgtatctggagcaaaataaaatacttgggagctatttgttagagcaaaacaaggcgttcgctgcaaaggaaaaggatatggatgcttttcactcccaaatcattgctctaaggacgactgagctaaataacaccattgagaggatggatgcgttaagcaaacaaatggatgaagagaatgcagcaatggagcaagccaaaaaggacatggatgcaggcctggtagagtaccaaaacaaacaagttgcaaatgccctctttgctgtcttgggtgccattgctagtattggtctggcatttgcgactggtggggcaactgctcccggagctgtggctgctgcaggagcagccgtgaccgcggctgggaaggcagctgagggattgaagaaagtactagagattcttgaaggcttacaagtggtgatggaggttgtggctgccataaaagagctggtagaatctctacaggggatagggcagctagtggatgcccctgagatgccagatctgccttcgaatgcggattgggagatttttgtgaatgaagttgaggcagtggcagagcagatgccaacagaggtgacacaggtgcctgcctggaaggccaagtgcaagaatgtggcagctttaggccgagagatgagcacaatggcggcacacattgcagagctgcagtaccagatacaggtccaagagatgttgcgcgagatcgcacaaaagcaggcagataggctgtcttccatcacgcccgcagacttgacgaactacctggagatggtgtcacaaatggacatgcgaacaactcgcatgttgttggagctgattcgagtgctatacatccagaatgcagcattgcagtatgagtatctacagacacccgccccattgagcgcatggcctgtggacatgcaaacggtgtgggccttgcttgtacaacaagagactacggccattactgggttgctggagctgggggcgccttctgacttcacacaagaatatgtagtgaaagatatccctgtgcgcttgttgctagagggacaagactgggagtttgagctgccagttataaatgcagatttcccctccacttggtctcgagtgcgcatccaccatgtggacatgcaatttgatgctgcaggcacgcctgatgtgcatgtacccacaaccaagagtggagaggtgtacatgctcctccaaagttctcgcttcttcgatgaccgtgccaagcgtgaaaatgagtttatcagctatcaggcaggcacgggcctattctaccagtatgcctaccgcctggccaccggcgaggccaccgtcaccaacatccccactgaggagtatgccaatactttcatgcgcctcgcacccttcacgcgttggcgacttcgtctctcttcctctgctgtcgaaaaccagggtatcgcatttcccacagccacatctgcagatgacaccacccaaatcaaaatcaccttctatgtctctgctattaggcgtataagcacgagaacaatataa

SEQ ID NO: 920 - DNA, 2601 bp, Arachnoides simplicolor variegata
atggagtacagcaatctctaccgtgacgtgaatacgctgagcttgtcgctgcagagaacggagctatcggaggtgatggtagtccaccgcatgcacgtgaagctagacgagctacacgtgcaaacgccagcaggcagcgagagggtgcagcggctgtacgtggtggcggacgtggtggagctgccgtttgggagcgtgagcttgccgtgcaaggcgtcactggtcatcctctgccgcgtcctctacatgccccactcaggccttcctctgtcgccgatctgccacctttatctgcccaacatgagcgtgcgtgtggtgtacgggccgtctgggatggaagtctatcccatggcaacagacggcagcgcggtcgccgtgtatatccacgccgatcgggtgatctggcggcaggatgactgggcagtggtgaggttgatgagcttgcaaataacaggcccggagagcacattctctgctccacatctgccggagccagtgcaggccttcaccgcgttgacgaatgtcatcatggatattgggcagcgcatccctgcttctgcatcggacttgcagcggtctgatgagattgaactgctgactcggtttggacttggagaccagcttcgagtagacttcccgggcagcagctggagcatcgctatggtgaacccctctgctacattcaacatctttccgattccgcacgcgcagcctgtcattcgagaggtgctgaccgatcctcatgttatcattggcctgcaaatgaacatgctcactgccgagctcgtccaggctgcccacaatgctcccctactgatcaatgctgtcaccagacatgtggaatggctcaacaaaattctagttgaggcattgccggttgcctctgacagcgaagatcttctagcactgttatttcgcacagaaacctatctgaagatggctgcagagtctcgtcccgtggtcccccggttacaataccacatgtacagaaacctcatccacagtatggtgcaggtggctcaagcttatgacaatgaatttcaacgactcaagctctttattgcacagaacgagatccttggcagctacttgttagaacagaatagggctcttgccagaagggaggaggaaatgagctcttatcactcccaagtggtgtctctgaggagaaccgagcttaacaactgcttagaaaggatggaccagttaagcgtgcagatggaaaacgagaataaagcaatggaggaagctaaagatgagatggataaagctcttgaggcacatgagagaagagaacttgcaagagctctctttgctgttcttggagcaatagcaacagttgccctcacttttgcgactggtggcgctgcggcaccactggctgtggcagcagctgggcaggcagtgacagcagcaggagcattagcacggggtttgcagagggtggttgaaattttagaaggcttgcaagctctcatggatcttgtggtgatcataagagagcttgtggaaaatttgcagagcattggccagctcattgacgcccccgagatgcaagaaatgccatcaaatgcagactggctgatttttgtgaacgaagtagaggctgtagccgagcaaatgccagcggaggtggttggatcggtggcagtgtggaaggccaaatgcagaaatgtagccgtgctgggccaggagatgtgtaccatggcagcacacattgcagagttgcaacaacagataaagctggaagagctgctgcaagagatagcaaagcgccaagcagatagattactgggtatatctgctgcagatttatcaagcttcacagagatgcttacgcagatagagatgcgtactactcggttgctggttcagctcatcaagttgttgcacatccagaacgtagcaataaattatgaatatctgtttcctgccaaaggacaacttagctcatggccagtgacaatgcatacagtgtggcagatgctcctgcagcaagagtcatcagctatcatgggtttgctgaccttggggacatccacggattttgcaaggacatatgttgtccaagacataccagtcggattactggttgatggttttgattggcagttcgcaatccctgtaatggacgattctttggcctttcccattggtttctctcgcgtgcgcatacgccatgttgagctcaaattctctgcaactgatagtgatgggtctgtgattgttcaccagcctcaaactgacaatgggttcatttatattctcttacagagtgcccagtccttctctgatcgcagagaaaggcaggcgatggactatgaggcaagcatgggacttgcctacccctatgcgtacaacctcaccacaggagttcctactctcaccaacattccgtcagagcagtatgccaacactttcatgcaaatgactcccttcactgggtggcgacttcgcctctcttcctctgctcaggagaataggggacttacattccccacagcagcttctcctgatgattctactcaaatttcaatcacatttcatatcaccgctattcgtgctatagatgtccgcagcatgggtgatgaggggcagtag

SEQ ID NO: 921 - DNA, 2601 bp, Arachnoides simplicolor variegata
atggagtacagcaatctctaccgtgacgtgaatacgctgagcttgtcgctgcagagaacggagctatcggaggtgatggtagtccaccgcatgcacgtgaagctagacgagctacacgtgcaaacgccagcaggcagcgagagggtgcagcggctgtacgtggtggcggacgtggtggagctgccgtttgggagcgtgagcttgccgtgcaaggcgtcactggtcatcctctgccgcgtcctctacatgccccactcaggccttcctctgtcgccgatctgccacctttatctgcccaacatgagcgtgcgtgtggtgtacgggccgtctgggatggaagtctatcccatggcaacagacggcagcgcggtcgccgtgtatatccacgccgatcgggtgatctggcggcaggatgactgggcagtggtgaggttgatgagcttgcaaataacaggcccggagagcacattctctgctccacatctgccggagccagtgcaggccttcaccgcgttgacgaatgtcatcatggatattgggcagcgcatccctgcttctgcatcggacttgcagcggtctgatgagattgaactgctgactcggtttggacttggagaccagcttcgagtagacttcccgggcagcagctggagcatcgctatggtgaacccctctgctacattcaacatctttccgattccgcacgcgcagcctgtcattcgagaggtgctgaccgatcctcatgttatcattggcctgcaaatgaacatgctcactgccgagctcgtccaggctgcccacaatgctcccctactgatcaatgctgtcaccagacatgtggaatggctcaacaaaattctagttgaggcattgccggttgcctctgacagcgaagatcttctagcactgttatttcgcacagaaacctatctgaagatggctgcagagtctcgtcccgtggtcccccggttacaataccacatgtacagaaacctcatccacagtatggtgcaggtggctcaagcttatgacaatgaatttcaacgactcaagctctttattgcacagaacgagatccttggcagctacttgttagaacagaatagggctcttgccagaagggaggaggaaatgagctcttatcactcccaagtggtgtctctgaggagaaccgagcttaacaactgcttagaaaggatggaccagttaagcgtgcagatggaaaacgagaataaagcaatggaggaagctaaagatgagatggataaagctcttgaggcacatgagagaagagaacttgcaagagctctctttgctgttcttggagcaatagcaacagttgccctcacttttgcgactggtggcgctgcggcaccactggctgtggcagcagctgggcaggcagtgacagcagcaggagcattagcacggggtttgcagagggtggttgaaattttagaaggcttgcaagctctcatggatcttgtggtgatcataagagagcttgtggaaaatttgcagagcattggccagctcattgacgcccccgagatgcaagaaatgccatcaaatgcagactggctgatttttgtgaacgaagtagaggctgtagccgagcaaatgccagcggaggtggttggatcggtggcagtgtggaaggccaaatgcagaaatgtagccgtgctgggccaggagatgtgtaccatggcagcacacattgcagagttgcaacaacagataaagctggaagagctgctgcaagagatagcaaagcgccaagcagatagattactgggtatatctgctgcagatttatcaagcttcacagagatgcttacgcagatagatatgcgtactactcggttgctggttcagctcatcaagttgttgcacatccagaacgtagcaataaattatgaatatctgtttcctgccaaaggacaacttagctcatggccagtgacaatgcatacagtgtggcagatgctcctgcagcaagagtcatcagctatcatgggtttgctgaccttggggacatccacggattttgcaaggacatatgttgtccaagacataccagtcggattactggttgatggttttgattggcagttcgcaatccctgtaatggacgattctttggcctttcccattggtttctctcgcgtgcgcatacgccatgttgagctcaaattctctgcaactgatagtgatgggtctgtgattgttcaccagcctcaaactgacaatgggttcatttatattctcttacagagtgcccagtccttctctgatcgcagagaaaggcaggcgatggactatgaggcaagcatgggacttgcctacccctatgcgtacaacctcaccacaggagttcctactctcaccaacattccgtcagagcagtatgccaacactttcatgcaaatgactcccttcactgggtggcgacttcgcctctcttcctctgctcaggagaataggggacttacattccccacagcagcttctcctgatgattctactcaaatttcaatcacatttcatatcaccgctattcgtgctatagatgtccgcagcatgggtgatgaggggcagtag

SEQ ID NO: 922 - DNA, 2599 bp, Arachnoides simplicolor variegata
atggagtacagcaatctctaccgtgacgtgaatacgctgagcttgtcgctgcagagaacggagctatcggaggtgatggtagtccaccgcatgcacgtgaagctagacgagctacacgtgcaaacgccagcaggcagcgagagggtgcagcggctgtacgtggtggcggacgtggtggagctgccgtttgggagcgtgagcttgccgtgcaaggcgtcactggtcatcctctgccgcgtcctctacatgccccactcaggccttcctctgtcgccgatctgccacctttatctgcccaacatgagcgtgcgtgtggtgtacgggccgtctgggatggaagtctatcccatggcaacagacggcagcgcggtcgccgtgtatatccacgccgatcgggtgatctggcggcaggatgactgggcagtggtgaggttgatgagcttgcaaataacaggcccggagagcacattctctgctccacatctgccggagccagtgcaggccttcaccgcgttgacgaatgtcatcatggatattgggcagcgcatccctgcttctgcatcggacttgcagcggtctgatgagattgaactgctgactcggtttggacttggagaccagcttcgagtagacttcccgggcagcagctggagcatcgctatggtgaacccctctgctacattcaacatctttccgattccgcacgcgcagcctgtcattcgagaggtgctgaccgatcctcatgttatcattggcctgcaaatgaacatgctcactgccgagctcgtccaggctgcccacaatgctcccctactgatcaatgctgtcaccagacatgtggaatggctcaacaaaattctagttgaggcattgccggttgcctctgacagcgaagatcttctagcactgttatttcgcacagaaacctatctgaagatggctgcagagtctcgtcccgtggtcccccggttacaataccacatgtacagaaacctcatccacagtatggtgcaggtggctcaagcttatgacaatgaatttcaacgactcaagctctttattgcacagaacgagatccttggcagctacttgttagaacagaatagggctcttgccagaagggaggaggaaatgagctcttatcactcccaagtggtgtctctgaggagaaccgagcttaacaactgcttagaaaggatggaccagttaagcgtgcagatggaaaacgagaataaagcaatggaggaagctaaagatgagatggataaagctcttgaggcacatgagagaagagaacttgcaagagctctctttgctgttcttggagcaatagcaacagttgccctcacttttgcgactggtggcgctgcggcaccactggctgtggcagcagctgggcaggcagtgacagcagcaggagcattagcacggggtttgcagagggtggttgaaattttagaaggcttgcaagctctcatggatcttgtggtgatcataagagagcttgtggaaaatttgcagagcattggccagctcattgacgcccccgagatgcaagaaatgccatcaaatgcagactggctgatttttgtgaacgaagtagaggctgtagccgagcaaatgccagcggaggtggttggatcggtggcagtgtggaaggccaaatgcagaaatgtagccgtgctgggccaggagatgtgtaccatggcagcacacattgcagagttgcaacaacagataaagctggaagagctgctgcaagagatagcaaagcgccaagcagatagattactgggtatatctgctgcagatttatcaagcttcacagagatgcttacgcagatagatatgcgtactactcggttgctggttcagctcatcaagttgttgcacatccagaacgtagcaataaattatgaatatctgtttcctgccaaaggacaacttagctcatggccagtgacaatgcatacagtgtggcagatgctcctgcagcaagagtcatcagctatcatgggtttgctgaccttggggccatccacggattttgcaaggacatgttgtccaagacataccagtcggattactggttgatggttttgattggcagttcgcaatccctgtaatggacgattctttggcctttcccattggtttctctcgcgtgcgcatacgccatgttgagctcaaattctctgcaactgatagtgatgggtctgtgattgttcaccagcctcaaactgacaatgggttcatttatattctcttacagagtgcccagtccttctctgatcgcagagaaaggcaggcgatggactatgaggcaagcatgggacttgcctacccctatgcgtacaacctcaccacaggagttcctactctcaccaacattccgtcagagcagtatgccaacactttcatgcaaatgactcccttcactgggtggcgacttcgcctctcttcctctgctcaggagaataggggacttacattccccacagcagcttctcctgatgattctactcaaatttcaatcacatttcatatcaccgctattcgtgctatagatgtccgcagcatgggtgatgaggggcagtag

SEQ ID NO: 923 - DNA, 2601 bp, Arachnoides simplicolor variegata
atggagtacagcaatctctaccgtgacgtgaatacgctgagcttgtcgctgcagagaacggagctatcggaggtgatggtagtccaccgcatgcacgtgaagctagacgagctacacgtgcaaacgccagcaggcagcgagagggtgcagcggctgtacgtggtggcggacgtggtggagctgccgtttgggagcgtgagcttgccgtgcaaggcgtcactggtcatcctctgccgcgtcctctacatgccccactcaggccttcctctgtcgccgatctgccacctttatctgcccaacatgagcgtgcgtgtggtgtacgggccgtctgggatggaagtctatcccatggcaacagacggcagcgcggtcgccgtgtatatccacgccgatcgggtgatctggcggcaggatgactgggcagtggtgaggttgatgagcttgcaaataacaggcccggagagcacattctctgctccacatctgccggagccagtgcaggccttcaccgcgttgacgaatgtcatcatggatattgggcagcgcatccctgcttctgcatcggacttgcagcggtctgatgagattgaactgctgactcggtttggacttggagaccagcttcgagtagacttcccgggcagcagctggagcatcgctatggtgaacccctctgctacattcaacatctttccgattccgcacgcgcagcctgtcattcgagaggtgctgaccgatcctcatgttatcattggcctgcaaatgaacatgctcactgccgagctcgtccaggctgcccacaatgctcccctactgatcaatgctgtcaccagacatgtggaatggctcaacaaaattctagttgaggcattgccggttgcctctgacagcgaagatcttctagcactgttatttcgcacagaaacctatctgaagatggctgcagagtctcgtcccgtggtcccccggttacaataccacatgtacagaaacctcatccacagtatggtgcaggtggctcaagcttatgacaatgaatttcaacgactcaagctctttattgcacagaacgagatccttggcagctacttgttagaacagaatagggctcttgccagaagggaggaggaaatgagctcttatcactcccaagtggtgtctctgaggagaaccgagcttaacaactgcttagaaaggatggaccagttaagcgtgcagatggaaaacgagaataaagcaatggaggaagctaaagatgagatggataaagctcttgaggcacatgagagaagagaacttgcaagagctctctttgctgttcttggagcaatagcaacagttgccctcacttttgcgactggtggcgctgcggcaccactggctgtggcagcagctgggcaggcagtgacagcagcaggagcattagcacggggtttgcagagggtggttgaaattttagaaggcttgcaagctctcatggatcttgtggtgatcataagagagcttgtggaaaatttgcagagcattggccagctcattgacgcccccgagatgcaagaaatgccatcaaatgcagactggctgatttttgtgaacgaagtagaggctgtagccgagcaaatgccagcggaggtggttggatcggtggcagtgtggaaggccaaatgcagaaatgtagccgtgctgggccaggagatgtgtaccatggcagcacacattgcagagttgcaacaacagataaagctggaagagctgctgcaagagatagcaaagcgccaagcagatagattactgggtatatctgctgcagatttatcaagcttcacagagatgcttacgcagatagatatgcgtactactcggttgctggttcagctcatcaagttgttgcacatccagaacgtagcaataaattatgaatatctgtttcctgccaaaggacaacttagctcatggccagtgacaatgcatacagtgtggcagatgctcctgcagcaagagtcatcagctatcatgggtttgctgaccttggggccatccacggattttgcaaggacatatgttgtccaagacataccagtcggattactggttgatggttttgattggcagttcgcaatccctgtaatggacgattctttggcctttcccattggtttctctcgcgtgcgcatacgccatgttgagctcaaattctctgcaactgatagtgatgggtctgtgattgttcaccagcctcaaactgacaatgggttcatttatattctcttacagagtgcccagtccttctctgatcgcagagaaaggcaggcgatggactatgaggcaagcatgggacttgcctacccctatgcgtacaacctcaccacaggagttcctactctcaccaacattccgtcagagcagtatgccaacactttcatgcaaatgactcccttcactgggtggcgacttcgcctctcttcctctgctcaggagaataggggacttacattccccacagcagcttctcctgatgattctactcaaatttcaatcacatttcatatcaccgctattcgtgctatagatgtccgcagcatgggtgatgaggggcagtag

SEQ ID NO: 924 - DNA, 2580 bp, Osmunda regalis
atgtggtgtggttcatgtgaagatccacagcctccatctcccatacaaccggaagatataagcatggcttccgtggattacggccagatataccagaatgtgaaccaaataacgaggccagtggcgaccaaggagtgctcggaggtgatggccatccatcggatgtatttgcagctggacaacttggacgtggagctcctcacgaaagccaacactgtgaagcagctggttgtgtttgtggacgtggtggaaattgagagcgacaatgtgaagctgccggggtcgagtcaagtcaccatagtgtgtcgcatccttcatgtcaagaaaaacaacgttgccctcaattttgacttcttggggccaactaagtgcaatggccggtctacgagaggttatgcacgcattatggacgatagccctgtatttgagttgtccatatacgcgcaacagctggtgggcgatgacggtgctatgttgcgggtgcggcatccggtgaccgttgcgacgatcgagaatggtcatgactatgaggtgagagaggggaacatggagtggcagatttggccttactctagtaccggcctctccagcgccgcacgctctcatgaattgaagaccatcggggaccatggaagggagaggacgtggctaataatcgaacaagaatggtctcgtttcattgctgtcgtcccagacttgattccactgagatggcttacggattccaacgtcctgctcggcatggaagccactttgctaactgcggaactgattttgagctaccaaacagatgcacaagcaactgttgctgctgcactgcagcatgtggaatggctcaatacccagttgcttcaggtggtggaggagacagacttggaggcaactggtgaacgtctgctctcacttttgttccgcgcacagtcgctcttgaagttgccagtggacgggagccatactttaatagtgccacggctagaatatggcctataccgtgatctgattaacagaatgaccgatgtggcggagaagtacaacagtgaattcatgcaaatgaaccttttcattcaacaaaatgagatccttggtacctatttgctggaacagaacaaagtgtttgctcagaaggagaaggatatggaggttttccattcatcgcttgtgactcttaaacaacaggagttgacatctgccaagagcaaaatggctcagttggaaactcaactgacggaacagaaagcagcaatggaccaagccaagaaagagatggatgaaggtctgcggagatacaatgatgcgcaggttgcgaatgctttctttgcggtgatattaggtgtagcttcaataggtctagctatcctcaccggcggtgcaactgcgggagcagctgtggcaggagcagctcaggctgtgtcagcagtgagtgcagttgcaaacacgctaggaagggtcgtggacattttggaggggttgcaaaaggtgatggaggtattggaagcaataaacgacctaacgacctcactcgcggctatcaatgaaatggtggaagcacctcaaatgcccgacatgccatcggaagctgattgggccatattcgaaaacgagatcgaggcagtggcagagagcatgcccactgaggtctcagaggtgcccacatggaaggctaagtgcaagaatgtggccgccgtgtgccgagagatcaccacaactgcaacctacattgggcagctccaatacgacctgctcgtgcaaagcatgcagcagcagattgccatgaggcaagccgaacgtctcgaggcaatccagccggcggacctgacaaattatctagaaatggctacagagctggatatgcgaactagccggatgctactgggtttgcttaaggtgttgacactacaaaatggggcactcttgtaccacttcttgctgccgcccaaaccattcacaggctgggtgagcatggacattgtgaggaacgcgctagtgcaacatgatatcgaagctgtgatagctcgaaccgagttgggcccctcgacggacttcacgcggacgtatgtggtggaaggcatacccgtcaccttgctcctcgaaggcgacgactggaacttcaccatccccgtccatgactccgcatttccgtccaattggtctcgggtgcggatccggtacctggaaatgaggtttagcagcagtgaggaggtccaccagcccaccaccaacacgggcgaagtgtacattctgctgcaagctgctcgcatgttcgacgatcggctcaagggcgatgtgctacactaccaggcagcagtgccattgcagtaccagtacgcatacgacctcaacaccggcgaaaccacccagagtaatctgccctcagaggaacacaccggtgagtacatgcggatgacacccttcactcgctggagactccgcctctcggcctcagcatacgagaaccaaggactggcattccccacagctacagccttggacagcaccacccagatctccatcacgttcttccttactgccatcaggcaaatcgatacacgcttcacagagctcatggatgagccgcagtag

SEQ ID NO: 925 - DNA, 2847 bp, Nephrolepis biserata
atgctcactcacttgatctttcctttgtgtgtgcagggtggcaacgttgcttgcaaagagaggtatacactgctcccttataattttctatgtttacacaggcaggatagtatggcaagttctgcttctgttggtgttgctgattggagggagttgtatagagatctgaaccaagtgagtgataggatgaggttcgatcaacttgagttctcagaattgatggtgattcaccgcatgcacatcaaggtgtcagagttgaatatgggacatctggagggctcagaaaaggtcaagcgtttctatgtgtttgctgacgtggttgaatacgacttggtcaaatccgacggtgaagtagcacatctcccggggtccatctccgttgtatttatatgccgtgagtggcatgttcacagccctattaatgccagacgggatagagatcctccaatgtatgtcttcagtgactgggtgttgaggctacggcttccgcacatgagatggcatttgaacgagcctcgtgaagacatgcatcgcatagacccagaaactatgcaagagttttcggaaccttccttctgcgtgtatgcagatgacgtaagcgttgcctactataattaccaagatggagagtcctcgtgggaccccgctcttggattccctctacctcaactactagcactatgtccagttgtgttctatgataatttgagcgctcccataccagatcaccttcttgtcacgcgcatgcagatgagcacgactacagttacgcgttcgagcactcgagtacggtttactatgcgttacgaggacaaccaagatgtcgtgaaagacattgcaacaatgccacaaggcacccgtgtcatatttaaacgggaagggcgtcttagcgatttcgtggttggtggatcagaaggatcgatcacaagcttagacgatggtgcagatggtagccgacttatgcctgcatggtctcttctcagacaggactcaaagttcccaatcgaacttctaacagatccaaatattttaccggcgatgcaaactagtatgctcattggggagcttgtggaggtcggtaacccttcagttgccatcactgaagttgtgcacaagcatgtgaaatggctcaacaaactcttgcttcaggtgatcgaggaaaagaacggcaaggacgtggaagactacatcgagctgtcgtttcgtgcacagtatgtaataaaggaagtgggaaggatacgtggccttgtagtgcctcagttgcaatacgacgtgtacagcaatctcatcaatcggatggctcaggtagcggaaagctatgaccaggcgctcaggcaatttcggctctccattcagaacacgaagatttctggtggctttttgttggagcaaaatcgggcctttgctgacaaggagaaggacatggatgttctctattctgaaattatcacacaaaggcaaattgaactggacaacacccttcaaaagttggaacgcctgagtttacaaatggagactcaacaagcagacatggagcaggcacaagcagatatggaagcagggctgcggcaatttcaaaataggcaagctgccagggctctttttgccgtacttggtgctatagcggcggtcgctcttaccgttgtcacgggtggggcagctgctcctctggctgtgggagcagccgggactgccgtgacagtagcaggaagtgtggtagcagggcttaagagagtggtagatgttttgaagcgcttacaagctgtaatggaggttgtggcacttatcaaagaactgttcgacaccctgcaagatttgaatcaggctgtggagctgccggatatgccagacatgccattacagtcggactggctcatctttgtgaatgaggtcgaggcagtggccgagggcatgccaacagaagtgtcagaggtggtggcgtggaaaactaagtgcaagaacgtagcggttctgggtcaggagatgatgacttcagcagcctacatttcacagctgcagtatgacattatggtgcagaatatgctgcagcagattgcgaggaagcaagccgatcggttgtcagccatccagctaccagacctgaaaaactttacagagatggtggtgcagatggacatgaggaccacgcgcctcctggtggctctcatcaaggtggtgtacatccagaatgcagccctcatgtatcaatacctatccgcacccacacccgtgtctgcatggcccgtgaacatggacacggtgtggcgcatgcttgtgcagcatgaacaactcgcaatccaaggtttagtgaggctggggcctgcttttgatattgtgcgcacatacgtagtgaagggcattcccgtaagcctgctcctggatggagatgactacgagtttgagattccagcggaggaccccctcacatttccattgccattgtcgcgtgtgcgcatccatcacctggagatgaagtttgtgcaaggggtggcacaggtccacatccccaccacagccaccggcgccatatacatccttctgcaaggatcgcgcaacttccacgaccgcaatgaaggcgagataatgcatttcgaggcggccaccgcactggattaccactatgcctaccatctggagacaggggagaccaacgtcaccaacctgccctctgccgagtttctcagaaccttcatgcgcatgacacccttcagtaactggaggctccgtttgtctgcctctgcggaggagaaccaagggctggctttccccactgccacatccgccgatgccaccactcaaatcgccatcactttccacatttctgcaattaggcgggtctctctctag

SEQ ID NO: 926 - DNA, 3240 bp, Gymnocarpium dryopteris
atgggggagaatgtggaggacaatgagtatcactatgactatgaggctgcatacaaggagatagatgagcattttaggacagttgtaaaaagggagtgctcggaggagatgatggttgtgcatcgcatgtacttgcggctagatgatatagatgcggggcatcttccgaacccggagggggtgaagataatgcttgtgtatgcagatgtagtggatgtggagagtgaacggctggagtttgcagggagatttgaagtgtacatcatgtgccgcctgttgagagtgaaagcaaggcatggcagcactttggatttcaagtacttcacgcctgttggagcatgcatgagcatactccaattaccagcttggactatggatgaacaactgcacatctgggcacaacaactgatgggtggtgagagtgagcaggagctggcaatcagagcggagttttgggcttacgaggaaactacacgtgtacaagttgtaggggaatggcaagtgaagccgtatggaagagaatgcacaaaggatgagagtgtagtccgcacatgccaaactctccagaagcctggcttcacttaccggcctgatgaatctgacttccaagaagcccaaagtgaagttgaagaccttctttgcactgggcctcgctggtttaaagaatgtttccatcttgtgtctccagaacccatctctgtaaactggagcgatgaactctgcgaaactattgaaggcgctttctcctctctcgagcttgccctctcgagaacctgcgtcatcccttctgctgccttcctccacctccaatggctcactcgacacttggctcagatgaggtctacaacaagtgtgagctctacaacaagtgcaattatcaatcgcttggaattacttctgtcccatgccaagactcttttgaacaacgttacttatttaaaactacatacaagaattatcggtgaggttgtatatgctgaggtatataagaatgtgagaagggcattttccactagggagtgttcggagctgatgaccatgcaacgcatgtattttctccttgatgacttggatgcaggcctctttaagaacccacaggtagtgaaggagctgattgtgtatgcagatattgtggagattggctctaccactttgaggattttggggtccacaagagtcgtcatcatgtgccgcctcctgagcttaaaaggatctcaagaattctcaccttttatcctcaattttccacacatttctcatgatcatacttcatcttgtttatctctttatgtttctccagccatgcttttgaatcagcttcctacatcgggagtgtacatctatgcacaagaattgattataagcaaccccttaaatcctaccacatgtttttccacatccttccaatcctcaattcctgtggagatcctaggtgattccaatgtgcttcctctgatccaagctgctctgcatagtttaacctaccaattaagcgcaacagcaaatgtgaagactgctcaagatcatctacaatggcttatcacccatctggctcaggtacgcctttgtcatgggatgcaggaagagaacaagactaatctgcatgaatcctcattgaatgatctgcgtgatcttctcctccacgcacagttactcttgaaaatgtccaatgaaagcgaaagtgtaatagttccaagcttgcgttatgagaaatatagtaagttgattgagaggatggctaccgcagcatcagattacaactcccaattcctacaagtggattattttattcggcaaaatcaaattacaggtgattacttactgcaacagaataagatatttattgagaaggaaagagatgttgaatatttccactctttgcttactgagtgtaaaaaaaccgagttggatgctgcaattagcaaaatgaagaacttaaaggagcaattgactacccaggaggcagaaatgaaccaagccaaaaaagacatgcacacaggtctgattgcaaatgctgtgtttactctatttgaagctgtgtttgaattggggctagctgcatccacacttgccaatgcagcaacaacccttcgtagatttaaagaggttgtcgataaagcaaaaaaggcaaaggacactttagaggagatagtgaagatggtaaagatggtggaaaacatttgttcatacttcgatgcactaatggatgtctatacacttgacattgagaagctacagcaaggtcttgtgatgcctgaaatgccatcaaaagcagattgggaaatctttgagaacgaattaacagcagtggcagagaacatgcccttggagatatcacaggtacccatttggaaggccaagtgcaagaatgtggcttctgtgttccgagagttaatcacaacggcctcttacatgaagcagcttgaatatgacatccttgtggaggacatggaagcaaaaattgctgcaaagcaagcggagcgtttggacatgacacttgcagacttgaagaattatgaggagatggcgatgcaactagaaatgcgaaccaccaggatcctttcgcacctgctcaaggcgttgaaggtacagagtggggctctcttgtaccactacctgctgccaccaaggtcaatcacaaactggatggacatggatgcggtgacgaatgcattgctaagttacgaggagttggcggtggagggtctggagcagttggggactcctactgactacagacgggagtatgttgtacctgacatacccatagctttgctaatgaatggacaagactggatcttcacaataccaatagatgactacttagtgttccctgcccattggagcacagtgcgcataaagtatgtggagatgaggttcaatgaggggcattatcttccttctaccagctctggtcaagtttacttcttgctgcaagcttctcgcatgtttcaggatcggaagaagggcgaagtgctcaactatgaggccgcgattcctttggattaccagtttgcctacgagctcgaaaccggtcacccaactgtcaccaacaagcctacttatgaatataagggaacttttatgaggatgacgcctttcactcaatggagacttcgtctttctgcctctgcacatgagaaccaaggactctccttccccacagccagagaagcaaacagcacgacccagatctccatcaccttttaccttacagctatccgtgaaaagagtatctag

SEQ ID NO: 927 - DNA, 2589 bp, Astrolepis sinuata Jo Levy
atggccgtgccggattactatcgcatatacaagaacgtgaatcaagtgacacgcgcggtggcgagcacgcagtgctcggaggtgatgagcatccaccgcatgtatttcaagctggacatgttggaagtggagctgctgacagatgccagaacggtgaagcagctggtagttttcgcggacgtggtggagattgaaaaagacaaggtgcagctgccagcgtccagcaaagtcacggtcgtgtgccgcattctgcttgtgaagaaggagaacgtggcgctggagttcacgctcttagcgccagttgcatgcgaaagtgggataattgagggaagtgtggcccgtattaggagcagcagcccagctggggttggattatccatatacgcgcaacaagttgtgtgcagcacagcgtcagctctgctgcaggttgagcatccggtgacagtacaaaggggttatcctgaatcttgcagccacccactccaagtcatccccgggaacatccactggcgcattcggatcacttcttctcatgatggcaacctctccactgctgaacgctcccaggagatccgggcaccgatgcatggcggaataacctggagcgtaatgcctacggagtggtcttcgtttatatctttgctccagcctgtcttaattcccctggacagcatggccgatcccaatgttatactcggcatgcaatcctccttgcttattgcagagttagttctaagctaccaaacacatgaaccagacacggtttctgctgcactccagcatgtgcaatggcttggcacaaacttgctccaggtggtggctgatcaaaactctggccagcagctgctggacaggccggatcagacaacccaggagcttctcacactcttggcccgttcacaatctctccttaagatgccacttgatggaagccagactttgattgttccacggcttgagtatggccaatatcgtaatctcatcagcagtatggctaccgtagctgaagcgtataactctgaattcaaacaagtagatcttttcattcagcaaaatcagattcttggcagctatttgttacagcagaacaaggcatttgctcagcgggagaaggacatggaggctttctatggattggtcgtggcacgcaaacacgaggagttgagggctgcgcaggacaggatgaacgaattaaatgctcaactaacacaacagagggaagcaatggatgaagccaaagaaaaaatggacaaaggtttgcagaaatacaaagacgaacaagttgcaaaggcgttctttgcggttctgaaaggcgtgctggaagttgggctagccatcttcaccggtggagcaactgcaggggcagcagtaaaaggggcatctgaggctgttattgcagtgagtgatctggcaggaatgcttcaaactgtgctgaatattatggaggggatggagaaggtgatggaggtcttgaatgcaatgaaggacctcaccacttcgctttctgaaatcaatcaaatggtggaggcacctaagatgcctctcatgccatccaaaatggagtgggacatcttcgagaatgagatggaggaagtggcagaaagcatgccgaccgaggtgatagaggcgaggacatggaagacgaagtgcaggaatgtggcggcggtttgcagggagatctgcacaactgctgcctacattgggcagctggaatatgacctctttgtgaacagcagtcaggaggagattgcaaaaaagcacgcagaacggctggaagtgattcaaccggcggatctcaaaaattatttggagatggcgacgcagctcgatatgcgaacgagccgcatgttattaggattattgaaggtgttgaccttacagaatggggcattgctatttcattacctgctgccgcccaagccgtttaccggatgggtgaccatggatatggtgaggaatgccttagtacaacatgaagctgatgccttggcagctagggagaggttggggccttctacggacttcacgcagacatatgtggtgagcgacataccgctctcgctcctcctggatggggatgattggatattcaccatcccaacggatgaccccacgttccccctgagctggtctcgcgtgcgcatccgctacttggagatgaagttcagtggtggtgaggactaccacaagcccactaccaacagcggccaggtctatattttgctccaagctgcacgcatcttccaagatcgccttttcaatgaggttctccattatgaggctgctatgccactgcgatatcagtacgcatatgacttgaaatctggtgaaacaactctttctaataggccttcacagcaacatgacggtgaatttatgcagatgacacccttctgccaatggaggctacgcctctctgcttcagccattgagaatctaggccttgcgttcccaacagctgagtgtgcttctggggacttgacttaccagagaccattcacccaaatctccatcattttttaccttactgccataagaaggattgacacaaggcatgagcgttcgagggatggatttgttgagagttga

SEQ ID NO: 928 - DNA, 2517 bp, Pyrrosia lingua
atgggaaatgcaatgacaggtcctagctacgaggagatctacaagaatgcaaactacatacataggtcggtggctacgccagtctgctcagaggtgatgtccgtgagcaggatgcatatggctgtctcggagctggatgtgaagcggttgaagaaccctgagattgtgaaggagctgtatgtgttcgcagacgtactcttttgggacgatggatcaaccatatggcctggggcagaggtcgtgttcgtcatgagccgtgtaactgtacttgacatggcaattctcgctagcaccggcgctgcagaagctgcagcgaatgtgactgcgagcattagagtaccctggctaaatgtgcctagcaccactttcaatatcagccaccaggaccagatagtgtcacccttttcctgctccatcaggccaaagcacagtactactagggccggtactgcgcctgctggtttcttcctgcacacgcaacagctcatggatacatcacatgccactaaacctgccatctcagattttgttcttaagcttgagactcgggaaggctcgtttgcgcatgacgagggtgtagatgaaagcatacgggaaatttttaacgatgctaggcttttttgggccgatgtgaatctaaccttattgtgggctatggaggccactgtgcttgttgcggagctgatactgacctacatgtcttcctctacgcgcacagtcaaagaagcaaccttgcacttgaaatggatgaaccagctgctaatccatgcacttgaaacgaaggatggtgagccggatgcggctgtggagcgcctcttcaatactctcgcgctgcaggtgccactcatcttgaacaatccatcattagttgctggcttagtggtgccacgcctgcaatacagtacttatcggaatctcatcactacgatggctcatttggcggatggctacacccgagaattccagcagttggttatgttcatggatcaaaatgaggttctgggcactttcttgcttgagcaaaaccaggcatttgctgcaaaagagagggacatggaaagctttcacgcagagcttcacaaagtaaagacaaatgacttgattcaagctctagccaccttggagcaactcgaagttcttatgacagagatgaatgccgagatggaacaagcacagcaagacatggaggaaggtctcaggaggtttcggaatcggcaagttgctcgggcggtcttctcagtgttcggttcgatagttgcaatcgcttcagcattcttcactggtggtgcaaccgcaggggcggctgtgtcatcaacaaagaatgcagttaatcaggtggtggaaatgagaagctcattggagagaattgtggaaaccttggaaaagttgcttctggtgtctgactttctagtggccatgaaagagctcataaatgctgtgcaaaatatccacgatgcggcagctaacgtacctgcgcttccagacatgccaacagatgccgaatggacaatctttgagaatgagatagaggcagtggcagcagagatgcctgaagaggtgtctgaggtgttggtatggaagaccaaatgtaagaatatggccgctatagggcgtgagatggtgactatggcaacagtcatttcgcagctgcagtatgacgtcaggatgcatgaacttctgcaggagatatcaaggaatcaagcagagcgcctggaagcgattaggccagtggacgtccgcaactaccaagaaatggctacacagttggaaatgcgaaccacacaaatactgctgggccttctggaggttctttcactacaaaatgccgctatacagtaccaatatctgatgccaccaagccctgtcatcatgaccaataccatcattaccatgtctgatgtatggacagagctcttgcagcaggaagctgctgccatcgtagccctttcagagctggggttcccaacggaccgcaaggtgacatacacggtgaaaggtatacctgttggtgtgcttctggatggccaagattgggacttctccatttccacagaagatggtgatcactttccatatggatggagccgtgtgcgcatctcgtatgtggagctgaagtttggctcagcaagtttgggatcgacggcacaggcggagaatgaagagattcatgagcccgtcactgacaccggggaggtgtacatggtcctgcggggagaacaaacatttgtggatcgcaaaaggggagagaaggtaaggtatgaggctgtggcgcccgttaaataccagtatgcctaccagcttgagacaggcgaaacgacagaacagaatcgtcccacagaagagttcacaaaccacttcatgaggatgacacccttcacgcgctggaagctgcgaatacctggctccgccagagagaatcgaggattagcatttcccaaagctactgccatggatgcaaccacccaaatcaccatccatttttatgtgaccgccatcagggcagcagattggcactaa

SEQ ID NO: 929 - DNA, 2517 bp, Pyrrosia lingua
atgggaaatgcaatgacaggtcctagctacgaggagatctacaagaatgcaaactacatacataggtcggtggctacgccagtctgctcagaggtgatgtccgtgagcaggatgcatatggctgtctcggagctggatgtgaagcggttgaagaaccctgagattgtgaaggagctgtatgtgttcgcagacgtactcttttgggacgatggatcaaccatatggcctggggcagaggtcgtgttcgtcatgagccgtgtaactgtacttgacatggcaattctcgctagcaccggcgctgcagaagctgcagcgaatgtgactgcgagcattagagtaccctggctaaatgtgcctagcaccactttcaatatcagccaccaggaccagatagtgtcacccttttcctgctccatcaggccaaagcacagtactactagggccggtactgcgcctgctggtttcttcctgcacacgcaacagctcatggatacatcacatgccactaaacctgccatctcagattttgttcttaagcttgagactcgggaaggctcgtttgcgcatgacgagggtgtagatgaaagcatacgggaaatttttaacgatgctaggcttttttgggccgatgtgaatctaaccttattgtgggctatggaggccactgtgcttgttgcggagctgatactgacctacatgtcttcctctacgcgcacagtcaaagaagcaaccttgcacttgaaatggatgaaccagctgctaatccatgcacttgaaacgaaggatggtgagccggatgcggctgtggagcgcctcttcaatactctcgcgctgcaggtgccactcatcttgaacaatccatcattagttgctggcttagtggtgccacgcctgcaatacagtacttatcggaatctcatcactacgatggctcatttggcggatggctacacccgagaattccagcagttggttatgttcatggatcaaaatgaggttctgggcactttcttgcttgagcaaaaccaggcatttgctgcaaaagagagggacatggaaagctttcacgcagagcttcacaaagtaaagacaaatgacttgattcaagctctagccaccttggagcaactcgaagttcttatgacagagatgaatgccgagatggaacaagcacagcaagacatggaggaaggtctcaggaggtttcggaatcggcaagttgctcgggcggtcttctcagtgttcggttcgatagttgcaatcgcttcagcattcttcactggtggtgcaaccgcaggggcggctgtgtcatcaacaaagaatgcagttaatcaggtggtggaaatgagaagctcattggagagaattgtggaaaccttggaaaagttgcttctggtgtctgactttctagtggccatgaaagagctcataaatgctgtgcaaaatatccacgatgcggcagctaacgtacctgcgcttccagacatgccaacagatgccgaatggacaatctttgagaatgagatagaggcagtggcagcagagatgcctgaagaggtgtctgaggtgttggtatggaagaccaaatgtaagaatatggccgctatagggcgtgagatggtgactatggcaacagtcatttcgcagctgcagtatgacgtcaggatgcatgaacttctgcaggagatatcaaggaatcaagcagagcgcctggaagcgattaggccagtggacgtccgcaactaccaagaaatggctacacagttagaaatgcgaaccacgcaaatactgctgggccttctggaggttctttcactacaaaatgccgctatacagtaccaatatctgatgccaccaagccctgtcatcatgaacaataccataattaccatgtctgatgtatggacagagctcttgcagcaggaagctgctgccatcgtagccctttcagagctggggttcccaacggaccgcaaggtgacatacacggtgaaaggtatacctgttagtgtgcttctggatggccaagattgggacttctccatttccacagaagatggtgatcactttccatatggatggagccgtgtgcgcatctcatatgtggagctgaagtttggctcagcaagtttgggattgacggcacaggcggagaatgaagagattcatgagcccgtcactaacacaggggaggtgtacatggttctgcggggagaacaaacatttgtggatcgcaaaaggggagagaaggtaaggtatgaggctgtggcgcccattaaataccagtatgcctaccagcttgagacaggcgaaacgacagaacagaatcgtcccacagaagagttcacaaaccacttcatgaggatgacacccttcacgcgctggaagctgcgaatacctggctccgccagagagaatcgaggattagcatttcccaaagctactgccatggatgcaaccacccaaatcaccatccatttttatgtgaccgccatcagggcagcagattggcactaa

SEQ ID NO: 930 - DNA, 2517 bp, Pyrrosia lingua
atgggaaatgcaatgacaggtcctagctacgaggagatctacaagaatgcaaactacatacataggtcggtggctacgccagtctgctcagaggtgatgtccgtgagcaggatgcatatggctgtctcggagctggatgtgaagcggttgaagaaccctgagattgtgaaggagctgtatgtgttcgcagacgtactcttttgggacgatggatcaaccatatggcctggggcagaggtcgtgttcgtcatgagccgtgtaactgtacttgacatggcaattctcgctagcaccggcgctgcagaagctgcagcgaatgtgactgcgagcattagagtaccctggctaaatgtgcctagcaccactttcaatatcagccaccaggaccagatagtgtcacccttttcctgctccatcaggccaaagcacagtactactagggccggtactgcgcctgctggtttcttcctgcacacgcaacagctcatggatacatcacatgccactaaacctgccatctcagattttgttcttaagcttgagactcgggaaggctcgtttgcgcatgacgagggtgtagatgaaagcatacgggaaatttttaacgatgctaggcttttttgggccgatgtgaatctaaccttattgtgggctatggaggccactgtgcttgttgcggagctgatactgacctacatgtcttcctctacgcgcacagtcaaagaagcaaccttgcacttgaaatggatgaaccagctgctaatccatgcacttcaaacgaaggatggtgagccggatgcggctgtggagcgcctcttcaatactctcgcgctgcaggtgccactcatcttgaacaatccatcattagttgctggcttagtggtgccacgcctgcaatacagtacttatcggaatctcatcactacgatggctcatttggcagatggctacacccgagaattccagcagttggttatgttcatggatcaaaatgaggttctgggcactttcttgcttgagcaaaaccaggcatttgctgcaaaagagagggacatggaaagctttcacgcagagcttcacaaagtaaagacaaatgacttgattcaagctctagccaccttggagcaactcgaagttcttatgacagagatgaatgccgagatggaacaagcacagcaagacatggaggaaggtctcaggaggtttcggaatcggcaagttgctcgggcggtcttctcagtgttcggttcgatagttgcaatcgcttcagcattcttcactggtggtgcaaccgcaggggcggctgtgtcatcaacaaagaatgcagttaatcaggtggtggaaatgagaagctcattggagagaattgtggaaaccttggaaaagttgcttctggtgtctgactttctagtggccatgaaagagctcataaatgctgtgcaaaatatccacgatgcggcagctaacgtacctgcgtttccagacatgccaacagatgccgaatggacaatctttgagaatgagatagaggcagtggcagcagagatgcctgaagaggtgtctgaggtgttggtatggaagaccaaatgtaagaatatggccgctatagggcgtgagatggtgactatggcaacagtcatttcgcagctgcagtatgacgtcaggatgcatgaacttctgcaggagatatcaaggaatcaagcagagcgcctggaggcgattaggccagtggacgtccgcaactaccaagaaatggctacacagttggaaatgcgaaccacacaaatactgctgggccttctggaggttctttcactacaaaatgccgctatacagtaccaatatctgatgccaccaagccctgtcatcatgaccaataccatcattaccatgtctgatgtatggacagagctcttgcagcaggaagctgctgccatcgtagccctttcagagctggggttcccaacggaccgcaaggtgacatacacggtgaaaggtatacctgttggtgtgcttctggatggccaagattgggacttctccatttccacagaagatggtgatcactttccatatggatggagccgtgtgcgcatctcgtatgtggagctgaagtttggctcagcaagtttgggatcgacggcacaggcggagaatgaagagattcatgagcccgtcactgacaccggggaggtgtacatggtcctgcggggagaacaaacatttgtggatcgcaaaaggggagagaaggtaaggtatgaggctgtggcgcccgttaaataccagtatgcctaccagcttgagacaggcgaaacgacagaacagaatcgtcccacagaagagttcacaaaccacttcatgaggatgacacccttcacgcgctggaagctgcgaatacctggctccgccagagagaatcgaggattagcatttcccaaagctactgccatggatgcaaccacccaaatcaccatccatttttatgtgaccgccatcagggcagcagattggcactaa

SEQ ID NO: 931 - DNA, 2394 bp, Pyrrosia polydactyla
atgattgactatggggctgtctacgcgcatgtaaacgaggtagggaggaggctgggcacaggcaaggtgaagtgcactagggtgttggcaaagcagggaatggtggtgaggctggatgagttgacgatggaagagctgcaagatgcaggcgctgtcgagcaactagtggtgtttgcagacgtagtagaggtgtctggtacccgcgtgaacttcccaggcatgttcgtcaccatagtatgccgcatccttgtcctcctccacgactcgctacgactggacctcacacttcattcctcctggaacactgtaactaacaatccggcccgattctcgctctttgctcaaaaaatagtctcggcttcggcgccggcccgcaaaagtgtcgtgttgcagattaggcggccaagggaggacgtttcgcgagttagtacggctgcgtctgatcaagctaccgcctggggtgacatcatattcgtcgtgcaaacagtgcctgatgcaatgcgtggacgcttggaaacgggggtattggcttcgcttggagtactcgtcgaccccaacaccatcatgggcatacaatccaccctactcatcgcggagctcatcttaagctaccgaacagaccttccagaaactgtccaagctgcagtggagcacgcccaatggattaatagcaccctgcttgcggtggaggcctccttggattcttctgcagaagaagcactcgagctgagaaatctgttggctcgggctcagatgcttctgaagtttcccacagacggaagccagagtctcatcgtaccacgcttagaatatagagggtaccaaagcctgatcgaccgaatggtcacggtggcagagtcctacaatagcgagcttggccagttcatgttattcattacacagactcagatcctccagaacgaattgctagcgagaaccaaggcctttgctgcgaaggagagagacgtggcagatctgcaaagcagcattgtgtctcgcaaaagaactgagctacttcaggctgagcagacaatgacgcgcctaaacgacatactcaaccaacaagccaaagacatggagcaagctcaaaacgacatggaacagggtctgaaagaatacaaggacagagaggttgcacgggcctttataggtgtactagttgcggtggtggagattggggtaagctttgccactggcggactaacggcgctatcaggtattaggagatccatcaatgcagcaaaagggttggcccgcctggcagagatgataaaagcagtgataaaagtgatggagcagctagctgaagcgatggaggtgttgaatgccgtgagagcgttgatggatgcagtagcagtgtccaaggatatctttgaagcgccagagatgccagatatgccaaccatagcagagtgggacatctttgagaatgagattgaactggtggcagagggtatgccagaggaagtatcggaggcacgagtatggagggttaagtgcaagaatgtggcagcagtgtgccgagagatcacaagaacgggagtgtacataacccaattgcaatatgaactgtttgtgcaagcacaacaagaggcaattgcaacgaggcacgccgagcgtctagagcagattgaggctgtgaacttggacaactacatggagatggcaacgcagatcgacatgcggaccactcggctcctcttgggcctcctcaagatgatgtccatacagaatgcagcccttcagtatcactatctgctccctaaagagcccttcactggctggccaaccatcgatattgtgaggcggaggctcatagagaaggaaatccaagctgtacatggtctcgaggcactaggtatgagcaccaactttacaaggaccttcaacgttgaggacatctctgttgatctactcttgtctggggaggattggaacttcactctctcaccagagtccaactcgccttttcctctcactttctctcgggttcgaattcgtcatgtagaaatgaaatttgcgaataccctcgcccctcggccaagcaccacctctggcaagctctacattttgcttcaaggctctcgcacatttcaagatcgtcgaactcaccaggtacttgaatatgatgcggctgtcccaatcgcatatccgtatgcatataacctctccactggtgaaacaactctaagcaatgagccctctcaagacgatgcaagcaacctcctcttctttcgaatgacacccttcactaattggagacttcgcctctcttcctctgcctttgaaaacgaaggtctcttattccccgaaggtagtactaccactagtatggagatcacattccatattacagccattagatccattgacactcgtctacaagtctcttga

SEQ ID NO: 932 - DNA, 2394 bp, Pyrrosia polydactyla
atgattgactatggggctgtctacgcgcatgtaaacgaggtagggaggaggctgggcacaggcaaggtgaagtgcactagggtgttggcaaagcagggaatggtggtgaggctggatgagttgacgatggaagagctgcaagatgcaggcgctgtcgagcaactagtggtgtttgcagacgtagtagaggtgtctggtacccgcgtgaacttcccaggcatgttcgtcaccatagtatgccgcatccttgtcctcctccacgactcgctacgactggacctcacacttcattcctcctggaacactgtaactaacaatccggcccgattctcgctctttgctcaaaaagtagtctcggcttcggcgccggcccgcaaaagtgtcgtgttgcagattaggcggccaagggaggacgtttcgcgagttagtacggctgcgtctgatcaagccaccgcctggggtgacatcatattcgtcgtgcaaacagtgcctgatgcaatgcgtggacgcttggaaacgggggtattggcttcgcttggagtactcgtcgaccccaacaccatcatgggcatacaatccaccctactaatcgcggagctcatcttaagctaccgaacagaccttccagaaactgtccaagctgcagtggagcacgcccaatggattaatagcaccctgcttgcggtggaggcctccttggattcttctgcagaagaagccctcgagctgagaaatctgttggctcgggctcagatgcttctgaagtttcccacagacggaagccagagtctcatcgtaccacgcttagaatatagagggtaccaaagcctgatcgaccgaatggtcacggtggcagagtcctacaatagcgagcttggccagttcatgttattcattacacagactcagatcctccagaacgaattgctagcgagaaccaaggcctttgctgcgaaggagagagacgtggcagatctgcaaagcagcattgtgtctcgcaaaagaactgagctacttcaggctgagcagacaatgacgcgcctaaacgacatactcaaccaacaagccaaagacatggagcaagctcaaaacgacatggaacagggtctgaaagaatacaaggacagagaggttgcacgggcctttataggtgtactagttgcggtggtggagattggggtaagctttgccactggcggactaacggcgctatcaggtattaggagatccatcaatgcagcaaaagggttggcccgcctggcagagatgataaaagcagtgataaaagtgatggagcagctagctgaagcgatggaggtgttgaatgccgtgagagcgttgatggatgcagtagcagtgtccaaggagatctttgaagcgccagagatgccagatatgccaaccatagcagagtgggacatctttgagaatgagattgaactggtggcagagggtatgccagaggaagtatcggaggcacgagtatggagggttaagtgcaagaatgtggcagcagtgtgccgagagatcacaagaacgggagtgtacataacccaattgcaatatgaactgtttgtgcaagcacaacaagaggcaattgcaacgaggcacgccgagcgtctagagcagattgaggctgtgaacttggacaactacatggagatggcaacgcagatcgacatgcggaccactcggctcctcttgggcctcctcaagatgatgtccatacagaatgcagcccttcagtatcactatctgctccctaaagagcccttcactggctggccaaccatcgatattgtgaggcggaggctcatagagaaggaaatccaagctgtacatggtctcgaggcactaggtatgagcaccaactttacaaggaccttcaacgttgaggacatctctgttgatctactcttgtctggggaggattggaacttcactctctcaccagagtccaactcgccttttcctctcactttctctcgggttcgaattcgtcatgtagaaatgaaatttgcgaataccctcgcccctcggccaagcaccacctctggcaagctctacattttgcttcaaggctctcgcacatttcaagatcgtcgaactcaccaggtacttgaatatgatgcggctgtcccaatcgcatatccgtatgcatataacctctccagtggtgaaacaactctaagcaatgagccctctcaagacgatgcaagcaacctcctcttctttcgaatgacacccttcactaattggagacttcgcctctcttcctctgcctttgaaaacgaaggtctcttattccccgaaggtagtactaccactagtatggagatcacattccatattacagccattagatccattgacactcgtctacaagtctcttga

SEQ ID NO: 933 - DNA, 2394 bp, Pyrrosia polydactyla
atgattgactatggggctgtctacgcgcatgtaaacgaggtagggaggaggctgggcacaggcaaggtgaagtgcactagggtgttggcaaagcagggaatggtggtgaggctggatgagttgacgatggaagagctgcaagatgcaggcgctgtcgagcaactagtggtgtttgcagacgtagtagaggtgtctggtacccgcgtgaacttcccaggcatgttcgtcaccatagtatgccgcatccttgtcctcctccacgactcgctacgactggacctcacacttcattcctcctggaacactgtaactaacaatccggcccgattctcgctctttgctcaaaaaatagtctcggcttcggcgccggcccgcaaaagtgtcgtgttgcagattaggcggccaagggaggacgtttcgcgagttagtacggctgcgtctgatcaagctaccgcctggggtgacatcatattcgtcgtgcaaacagtgcctgatgcaatgcgtggacgcttggaaacgggggtattggcttcgcttggagtactcgtcgaccccaacaccatcatgggcatacaatccaccctactcatcgcggagctcatcttaagctaccgaacagaccttccagaaactgtccaagctgcagtggagcacgcccaatggattaatagcaccctgcttgcggtggaggcctccttggattcttctgcagaagaagcactcgagctgagaaatctgttggctcgggctcagatgcttctgaagtttcccacagacggaagccagagtctcatcgtaccacgcttagaatatagagggtaccaaagcctgatcgaccgaatggtcacggtggcagagtcctacaatagcgagcttggccagttcatgttattcattacacagactcagatcctccagaacgaattgctagcgagaaccaaggcctttgctgcgaaggagagagacgtggcagatctgcaaagcagcattgtgtctcgcaaaagaactgagctacttcaggctgagcagacaatgacgcgcctaaacgacatactcaaccaacaagccaaagacatggagcaagctcaaaacgacatggaacatggtctgaaagaatacaaggacagagaggttgcacgggcctttataggtgtactagttgcggtggtggagattggggtaagctttgccactggcggactaacggcgctatcaggtattaggagatccatcaatgcagcaaaagggttggcccgcctggcagagatgataaaagcagtgataaaagtgatggagcagctagctgaagcgatggaggtgttgaatgccgtgagagcgttgatggatgcagtagcagtgtccaaggatatctttgaagcgccagagatgccagatatgccaaccatagcagagtgggacatctttgagaatgagattgaactggtggcagagggtatgccagaggaagtatcggaggcacgagtatggagggttaagtgcaagaatgtggcagcagtgtgccgagagatcacaagaacgggagtgtacataacccaattgcaatatgaactgtttgtgcaagcacaacaagaggcaattgcaacgaggcacgccgagcgtctagagcagattgaggctgtgaacttggacaactacatggagatggcaacgcagatcgacatgcggaccactcggctcctcttgggcctcctcaagatgatgtccatacagaatgcagcccttcagtatcactatctgctccctaaagagcccttcactggctggccaaccatcgatattgtgaggcggaggctcatagagaaggaaatccaagctgtacatggtctcgaggcactaggtatgagcaccaactttacaaggaccttcaacgttgaggacatctctgttgatctactcttgtctggggaggattggaacttcactctctcaccagagtccaactcgccttttcctctcactttctctcgggttcgaattcgtcatgtagaaatgaaatttgcgaataccctcgcccctcggccaagcaccacctctggcaagctctacattttgcttcaaggctctcgcacatttcaagatcgtcgaactcaccaggtacttgaatatgatgcggctgtcccaatcgcatatccgtatgcatataacctctccactggtgaaacaactctaagcaatgagccctctcaagacgatgcaagcaacctcctcttctttcgaatgacacccttcactaattggagacttcgcctctcttcctctgcctttgaaaacgaaggtctcttattccccgaaggtagtactaccactagtatggagatcacattccatattacagccattagatccattgacactcgtctacaagtctcttga

SEQ ID NO: 934 - DNA, 2640 bp, Pyrrosia polydactyla
atggagtacagtgacttgtatgcggatgtgaaccaggtgagcttgaggttccagtcgacggagttctctgaggtgatggtggtccatcgcatgcacgtgcagctgcaggaccttgacatgacgacggggcccagcctcctcatgtttccgggcagtgagaaggtgcagcgactgtacatagtggcggacgtcgttgagctgccttccaatgccaccaatatgcggcttccggccacggtgtccgctgtcatcctatgccgcgtgctgtatgtgcaagatgtcaactcaccattcctcacctgcggcctccatttccccttgatgcgcatgcgcttggtggagacgaaagagggcttggtcaaggtctttccggttccggcatctgcctcctctgtagatgctgacatcggtctctacatccacgcggatcgtgtcatctatcggcaggacacctctaaccttgaccctcttcagcctctgcaattgagggtgatcggaggctcgacattctccaccgatgtgcgccccggctggacaacaaaccttgaggtgttttccctcattttatggctcaccctgtccaaggggcagcgcattcctgccacagagtctgatttgcagagatccgacgagtttgagcttttgcccccgcctaccccagataaactcaacgtagtctttacctatcttgcacctggaaacatctctagtatgttggtggatgttgaagctggagctacatttaacttctttcgggtacccccggcggaccctgtccctacagaagttctcaccagcccttacatcatcctgggcctgcaaatgaacatgctcattgctgaacttgtcctggctgctcacaattctccgcgggtcatcggtgttgtcacgaagcatgtggaatggcttaacaagattctcaagcccaagcttggtttagcaaatgatgatatatcagcacttctgtttcgtgtgcaaagctttttgaagatggctaatcagcctcgttccgttgtaccacggttgcaataccacatgtacagtaaccttatcaaccgcatggtgcaagttgctcaggcttacgaccaagaattcaggcaactcaagctcttcattgtgcaaaaccagatcctcggcagctacttgctagaacaaaataaggcatttgcaagcaaggaaaaggatatgagtgcattccactctcaagtcgtgtccctgaggaggaccgagctcaacaatgctattgacagaatggaccaattgagtgcgcaaatggaaagggagaatgaagcgatggaccaagccaaagaggagatgatgcaagctattgaggactatcagcagcaacaagttgccaatgccctctttgctgtgcttggtgccatagccgctgtggcccttgcatttgcaacagctggtgcaaccgcaccgggggctgtggcagcagcgggggcagccgtgactgcggcagggagactggcagaaggcttgcaaaaagttgtcgaaatattggaaggcctgcaaaaagtgatggagattattggaattataagggatcttgtagagtcactgcagaatcttggtaaactagtcgatgcgccggagatgccagacatgccatcagatgcagactggctaatctttgtgaatgaggtggaagcagttgcggagcaaatgccagcagacgtggttggttcggtggctgtgtggaaggcgaaatgcaagaatgtggctgtgcttgggcaggagatgtgcaccacagcggcacacatcggggagttaacataccagattaaggtggaggaaatgttacaagagattgcagaacgacaagcaaacaggttggaggggatcacacccgccgacttgtcgagctacaccgaaatgctatcacagatagacatgcgcaccactcgcttgctgcttcaacttatcagggtgttgcatatccaaaatgcggcactcaagtatgagtacttgttcactgcaagcgggcaattgaattcatggccggtgagcatggatactgtttggagcatgctattgcaacacgagaattcggctctcgtaggcttgttagacctggggccatccactgatttcacacgcaccgttgtgctcaaagacgttcctgtcggactgttagtgagtggtagtgattggcaagttgtcatcccggtggaggattctgttgcctttcccattgggttttcacgtgtccgcatacgctatgtcgagctcaaattcgagcaaggcagcaatgatgatggcaccgtaatccaccagcctcgcaccaatggtgggttaatttacctgctgctacaaagctctcgtttcttcaaggatcggaagcgtagagagatacttgactacgaggcaagcatgggactggcatacgcctttgcatacaatctcaccaccggagtgcccactcttaccaatgtaccctcccaggagtttgccaacacgttcatgcgcatgacacccttcaacaattggcgacttcgactttccgcctccgccgaggagaatcggggattagtgtttcctacggccacttctccaggcgacaggacccagatcgcccttacctttcacattactgctattcgcgcaatagatacgcgagcagatgagtag

SEQ ID NO: 935 - DNA, 2640 bp, Pyrrosia polydactyla
atggagtacagtgacttgtatgcggatgtgaaccaggtgagcttgaggttccagtcgacggagttctctgaggtgatggtggtccatcgcatgcacgtgcagctgcaggaccttgacatgacgacggggcccagcctcctcatgtttccgggcagtgagaaggtgcagcgactgtacatagtggcggacgtcgttgagctgccttccaatgccaccaatatgcggcttccggccacggtgtccgctgtcatcctatgccgcgtgctgtatgtgcaagatgtcaactcaccattcctcacctgcggcctccatttccccttgatgcgcatgcgcttggtggagacgaaagagggcttggtcaaggtctttccggttccggcatctgcctcctctgtagatgctgacatcggtctctacatccacgcggatcgtgtcatctatcggcaggacacctctaaccttgaccctcttcagcctctgcaattgagggtgatcggaggctcgacattctccaccgatgtgcgccccggctggacaacaaaccttgaggtgttttccctcattttatggctcaccctgtccaaggggcagcgcattcctgccacagagtctgatttgcagagatccgacgagtttgagcttttgcccccgcctaccccagataaactcaacgtagtctttacctatcttgcacctggaaacatctctaatatgttggtggatgttgaagctggagctacatttaacttctttcgggtacccccggcggaccctgtccctacagaagttctcaccagcccttacatcatcctgggcctgcaaatgaacatgctcattgctgaacttgtcctggctgctcacaattctccgcgggtcatcggtgttgtcacgaagcatgtggaatggcttaacaagattctcaagcccaagcttggtttagcaaatgatgatatatcagcacttctgtttcgtgtgcaaagctttttgaagatggctaatcagcctcgttccgttgtaccacggttgcaataccacatgtacagtaaccttatcaaccgcatggtgcaagttgctcaggcttacgaccaagaattcaggcaactcaagctcttcattgtgcaaaaccagatcctcggcagctacttgctagaacaaaataaggcatttgcaagcaaggaaaaggatatgagtgcattccactctcaagtcgtgtccctgaggaggaccgagctcaacaatgctattgacagaatggaccaattgagtgcgcaaatggaaagggagaatgaagcgatggaccaagccaaagaggagatgatgcaagctattgaggactatcagcagcaacaagttgccaatgccctctttgctgtgcttggtgccatagccgctgtggcccttgcatttgcaacagctggtgcaaccgcaccgggggctgtggcagcagcgggggcagccgtgactgcggcagggagactggcagaaggcttgcaaaaagttgtcgaaatattggaaggcctgcaaaaagtgatggagattattggaattataagggatcttgtagagtcactgcagaatcttggtaaactagtcgatgcgccggagatgccagacatgccatcagatgcagactggctaatctttgtgaatgaggtggaagcagttgcggagcaaatgccagcagacgtggttggttcggtggctgtgtggaaggcgaaatgcaagaatgtggctgtgcttgggcaggagatgtgcaccacagcggcacacatcggggagttaacataccagattaaggtggaggaaatgttacaagagattgcagaacgacaagcaaacaggttggaggggatcacacccgccgacttgtcgagctacaccgaaatgctatcacagatagacatgcgcaccactcgcttgctgcttcaacttatcagggtgttgcatatccaaaatgcggcactcaagtatgagtacttgttcactgcaagcgggcaattgaattcatggccggtgagcatggatactgtttggagcatgctattgcaacacgagaattcggctctcgtaggcttgttagacctggggccatccactgatttcacacgcaccgttgtgctcaaagacgttcctgtcggactgttagtgagtggtagtgattggcaagttgtcatcccggtggaggattctgttgcctttcccattgggttttcacgtgtccgcatacgctatgtcgagctcaaattcgagcaaggcagcaatgatgatggcaccgtaatccaccagcctcgcaccaatggtgggttaatttacctgctgctacaaagctctcgtttcttcaaggatcggaagcgtagagagatacttgactacgaggcaagcatgggactggcatacgcctttgcatacaatctcaccaccggagtgcccactcttaccaatgtaccctcccaggagtttgccaacacgttcatgcgcatgacacccttcaacaattggcgacttcgactttccgcctccgccgaggagaatcggggattagtgtttcctacggccacttctccaggcgacaggacccagatcgcccttacctttcacattactgctattcgcgcaatagatacgcgagcagatgagtag

SEQ ID NO: 936 - DNA, 2607 bp, Microsorum punctatum Elkhorn
atggattacggcacgctttacagggatctgaaccagataagcatgccggtggctcaggtacagttctcagaggtgttggtgattcataggatgtatctgaggttatctgatttggatgtgggggagcttggcggagctgagggagtgaagagggtgtatgtgtttgcggacgtggtggaccttgcaccagaagaggcagcaccgaggcatcagacccaaatgccaggatcagtgaaggtgatcataatgtgtcgtctgcttcgatttccgttggacggggcaacggctgcaacgctccggctgcggttcttgaagatgcatgccacattgaaagagtttcaggtaaggtcggagataacagcagccgatggcgtgaagtggggaacgtacatacatgcggacgatgtgcagtactttccgcagagtggagctgctctcaatttttcgagactttgggtctgggcagatgactctattataacctcagcccatcacaatgtgctgaacgaacctgggagaatagtttcctctgctacatttctatgggcgcatggccaacccaatcatgcgcatgtgagcgcagaacccgggtggaattttcgtaatgggttttccctcgccacagtttccccaacggcatcgagtgttctagctcgccagtgttggaatctacccttcacaagtattcccgtcgaggtggtggtcgatcctaacatcttattgggcatgcagactaccgtccacattgtggagctagtcaagatatgttgtccgttaccagacgtagtgagcgctgttgcggagcacacagtttggctcaacaaagtcttgctcgaagtggtccagaacgagtctcagttgcaaggaaccgagtcctacaacgagtgccttgtgcttttgggtcgtgttcaatctgtgatgaagatcggaagatttgaggcagtagtgccccagctgcaatacagactgtatggtagtctcatcaatcaaatggcgcaaacagcacgaacctacgaccaagaattcaagcaattcaagctgttcattatccaaaaccaaatccttggcagctatttgctgcagcagaacaaggcatttgctgagagggagctgcagatggagagctttcattcagcggtcatttctcagagaggtcaggagctggacaatgccatcgcaaagatggaccggctgagtttgcaaatggaggaagagaatgaagcaatggagcaagcccaaaaggaaatggaagaaggattacgggagttccaaaataggcaagttgcaagggcactattttctgttcttacagcagtagctatgattgggcttgcatttgtaacggctggtgcaacggctcctggagctgtggcgtcggcgggtcgagctgtgagcgcagctggtcaggccgcacaaggtctgcgaagggtggtggagattctagaggggctggaggctgtgatggaggtcgtggctgctgtgaaggagcttgtgaattcattggagcaagtaggtcagatgatagacgcaccggtgatgcccgatatgccctcggaggcggactggtcaatctttgtgaacgaaatcgaggccgtggcagaggggatgccgacggaagtctccgaggttccggtgtggaaggccaagtgcaggaatgtggctgcactgggcagggagatgagcatcactgcagcacagatttctgagctccagtatgacatatgggtgcaaggcttgatgcgggatatggctcgaagccaggcagataggctggcgacgattcaacccgcagacctttccagctatttggagatggcaacacagatggatatgcggactacaaggatgttgttagggctcctcaacatactgcgaatccagaatgcggcactcatgtacgagtaccttctaacgcccacggagctcacagcatggcctctgggtatggatactgtggccaacttgctcatcgcgcaggagaatgctgcactgttgggactaactgagctggggccgtcatcgaatttcacaagcaggcatgtggtgaaaggcatacctgtgagcttgctgcttgatggcgaggattgggagttcgagatccctgcgcaaagtggcatgtccagcttccctttcagctggactcgtgtccggattcgacacctggagatgcactttgtgcaggaagcaagtgatggcggcgagattatccaccagcctgccacccagacagggacggtttacatcctcctgcagggctccactatattccatgaccgcagaagaaacgaggtgatgacctttcaggcagcggctccgctcaactaccattacgcataccgccttgacactggcgaagccactcttacgaatgagccctcggaacagtttgccaacacattcatgcagatgacacccttcactcgctggaggcttcgtctatctgcgtctgccaaagagaatgcgggattagcgtttcccacagctacagctcccgattccagtaccgagattgtcatcacattccatgttactgccattagacaaattgactggcggcaggaggaggtggcagcaaaggatgctagtgacagtattgtaagctcataa

SEQ ID NO: 937 - DNA, 2484 bp, Athyrium filix-femina frizelliae
atgatccacaaagtgagaattgctgctgctgttgattacgagtccatctacaagaatgcaaatgagatagcgagggtggtggggactgacaagatctcctgctccgaggtgatggcgtgccacagaatgtttgtgaggttggacacactgtcggtggagcagttggtgggctccagcaatgtgaagcagcttatcgtgtttgctgatgtggtggaaatccaggacagcagctttactctaccggggtccacccagattttcatagcatgccgcatcttggatgtgaaggccaacaaggacatagacctcaccctagactggcaagtggtgaacaatgccggtcagaccagcatccctcgatgcgccatctacgcgcaaaatatcgtctcctcctccagcactaaaagtggcactatccttctcaaggtgaaatatcagagaaacagttcttcggcgcctgtatattttgggcgagagttctcctacagtgccgcctccaccgccgtggttgatttcagcactgcccaggacaacttggagttaataaacaggaaaaattgggttgtgaatatcaatggtatggaatggtccgcttatgttgacttgcaatttgggttgccttcagttgaggagctggcagaatacaacatcctaacgggcttacaatctaccatacttatctcggagatgattctcaactatcgaacagatttgccagatactgtaacagctgcaattgcgcatgtacaatgggccaacctttgcttgcttccggtggtgggtatgacaaacctggagggagcttaccagttgccttcattactaggtcgtgcacaatcacttctcaaattaccaacagatggaagtcagagtttaatagtcccacgtctggaatatagtgggtacgagaaactcattgcgcaaatggttaccgttgtagaatcctataacaacgaattcgtgcaacttatcctttttattcagcaaaatcagatcatgggtgcctatctgctggagcaaaacaaggcctttgctgcaaaggagaaggatattgcagaattggagtccatgattttggatcgcaagaaacaagagatggataatgcctttcaaaaaatggaggccttaaataagcagctcgaacagcaagtggaagagatgaatcaggctaaagaggacatggatgctggtatccagaaatacaaggatgagcaggttgccaaggcattctttgctgtaatcaaaggtatcctaggtgtggctctagcaattgccactggtggtgcaacttcggcaggagcagtagcgggggcggtggatgcggtggggaaggtgagccaactcgcaaaagcgctgcagaaggtggtggacatcttgcaagggcttgaggaactggccgcgattttgagtgcaatcaaattgctgttggagtccctcgaagatctgaataagatggtggaagcgccggagatgccagagatgcccaccatggcagactgggacatctttgagaatgagatagaggcagtggctgaacagatgccagaggaggtcgctgaggtgcctgtgtggaaggccaagtgcaaaaatgtggctgccgtgtgcagagagatttccactactgcagcctacatcgggcagctcgaatacgatctcttcctccatggcaagcaacaagaaattgcagaagcacaagccaaacgcttagagagcattacgccagcgaaccttaccaattacctagagatggccacccagctggacatgcgcaccacccgccttttggtgggcttgctaaaaatgctaacggtacaaaatggagccctgcaatatcactacctgttaccacccaagccattcacggggtggccgaccatggatcgtatcagaagtacattggtgcagaatgagcacaatgccgtgttggcccttgagcagcttggcttttccacggacttcacaaaaacctacgtgctgagcgatgtaccagtgcacttgctcctctcaggtgaggactggatcttcaacataccagtagatgacccaacattcccgtcgaattggtcccgggtgcgcattgtgtacctcgagataaattttactggagatgaaggatcaactcactttcccagcaccaacacgggcgaggtctacttcctgctccaggcctcacgcatgtttcaggaccgacttgagggggaatacctaaaatatgaggctgccacacctttacagtatcagtatgcctatgtccttcaaactggtgaaacaactgtgcccaataagccctcgcaggaagaggatggtagattcctgcgcatgacaccctttactagctggaggcttcgcctttctgcctctgccgacgaaaataaaggcctctcattcccctcagctaacgccttggacagcaccacccagatctccatcactttctacctcactgccatcagaaaaatcaatactcgtgagggaatcgaatag

SEQ ID NO: 938 - DNA, 2682 bp, Coniogramme venusta Ping Wu
atggctgctgcggcggagcggcggttgccggactatagagagctgtacaaggatttgaaccagataagtgagagggtgaggttcgatcagatggagttttcggaggtgatggtgatacaccgcatgtttataaggatggaggagttggacttggggcacctcgaaggagccgagaaggtgaagcgattgtatgtgtttgcagatgtggtggaggtggcagaaggtgttagttggggcctctggaggaacggcccattagcgagattgcctggttcgattgcgatagtcatagtgtgtcgcgtgctatgggtgagtggtgttcttgctagcctagggaataattccatgatgctacagcttccacacatgaagttgcgtgtgctggagatcacaccaagtaaactggaaatacatcgtgtagacactagtacagaagctgcagattatcctgccctctgcatacatgccagtgtcttggagtgctccaatatccgtttggcgaatgatagagacaggcctcctttcccggttcgtctctttggtttcaggcccgaactacgtgacccaaaccttgtcttctcttccgtgcctaggtctgttgttgatcaccaccctatttatgagttctatgtattctctgtaatccgcgatgtttttcctcgactgcccctcccagaatcagtctcagtccagcttgactcagccactcgcggggccaattggtatagtcttcaaacaggctccataagtcaagttggaagtgtttcattgaatcgctttccggctgaagaagaagagctggagccggcgttctcactaatgaagaccaaaatcccggctgccatactcacagatcctaacattttactcaccattcaaactagtctgcttatcgcagagttagttgaggtgactcacccttcagcggagacagtggctgctgtagccaagcatgccgaatgggtcaatgagctcttgcttcaggcgacatcagaagcggcagggacttcatctcatgaagagtacctcgcactcttattccgttcacagtacctcataaaagtgaggggcaggacacgcagccttgtagtgccacaattgcagtatgatgtttatagcaatctcatcaatcgaatggctcaagtagccgaaagcttcgaccagtcgttgaggcaggtcaaacttttcattttgcaaaacaagattcttggcagctatttgctcgaacaaaatagggcgttggctgaaaaggaaaaggatatggatgtttttcattcagagcttatttctcaaagtaagcttgaactggaaaataccatacaaaaaatggaacaattgagcttacaaatggagacacaaagagaaggcatggaccaagccaaagaggacatggatgcaggattgcgaagtttccaaaatagaagggttgcggaagccatgtttgctgtaatcagcgctacagctgcaatcggtctcgcatttgttaccggtggtgcaacagctcctgcagctgtgacggcagcagggaacgctgtaagagcagcgggtcaagctgcaaatgcgctccaaagagtagtggaaatcttggagggcttgcaagaggtgatggcaatggtggctctgataaaggagctagtggattccttgcaagacataggtcagcttgtggaagcaccagagatgccagtgttgccaagtgaggcggaatggttcatttttgagaataatgtcgaggaagtggcagaagggatgcctacagaggtgtcggaggtgtcggcatggaagacgaggtgcaagaatgtggcagtattgggtcgggcgatggtctctacagcggcttacatatcgcagctgcagtacgacatcaaggtcgaggtgatgcggcaggagatttccaaacgccacagtgaaaggctattggccatccaaccagcagatcttagcagctatacatcactgctgacgcacatggacatgcgcaacacacgcatgttactggtgctcatcagggtgctgcacatacagaatgctgcactcatgtaccacagcctatcactgccaacccatatgaatgcatggcccgtcactatggataccgtgtggcgcatgctggtgcaacatgaacatgctgctattctaggattgttgaggttagggcccagctttgacttcatgcgcacctatgtggtgaaggatattcctgtgagcctcctgcgtgatggtgaggactgtgagttcaacatctccgtgcaagatcacttagccttcccctccacctggtctcgtgtgcgcattcatcaccttgaaatgaagtttgtgcaggaggctcatgttcaccagcctagcactcatacgggcaaagtctacatccttctccaaggctctcgcatcttccacgatcgcaacgaggatgatgtccttcattatgaggctgccatgcctctcgacttacactacgcctaccggctcgacacaggggagactacactctccaatctgccctccaatgatttcatcaggacattcatacgcacgacaccctttactacctggagactccgcctctctgcctctgccgaagaaaacgaagggctcgactttcccactgcgcttactgccgacgccaccacccagattgcaatcactttctatgtctccgctatcaggcggatttctctctag

SEQ ID NO: 939 - DNA, 2682 bp, Coniogramme venusta Ping Wu
atggctgctgcggcggagcggcggttgccggactatagagagctgtacaaggatttgaaccagataagtgagagggtgaggttcgatcagatggagttttcggaggtgatggtgatacaccgcatgtttataaggatggaggagttggacttggggcacctcgaaggagccgagaaggtgaagcgattgtatgtgtttgcagatgtggtggaggtggcagaaggtgttagttggggcctctggaggaacggcccattagcgagattgcctggttcgattgcgatagtcatagtgtgtcgcgtgctatgggtgagtggtgttcttgctagcctagggaataattccatgatgctacagcttccacacatgaagttgcgtgtgctggagatcacaccaagtaaactggaaatacatcgtgtagacactagtacagaagctgcagattatcctgccctctgcatacatgccagtgtcttggagtgctccaatatccgtttggcgaatgatagagacaggcctcctttcccggttcgtctctttggtttcaggcccgaactacgtgacccaaaccttgtcttctcttccgtgcctaggtctgttgttgatcaccaccctatttatgagttctatgtattctctgtaatccgcgatgtttttcctcgactgcccctcccagaatcagtctcagtccagcttgactcagccactcgcggggccaattggtatagtcttcaaacaggctccataagtcaagttggaagtgtttcattgaatcgctttccggctgaagaagaagagctggagccggcgttctcactaatgaagaccaaaatcccggctgccatactcacagatcctaacattttactcaccattcaaactagtctgcttatcgcagagttagttgaggtgactcacccttcagcggagacagtggctgctgtagccaagcatgccgaatgggtcaatgagctcttgcttcaggcgacatcagaagcggcagggacttcatctcatgaagagtacctcgcactcttattccgttcacagtacctcataaaagtgaggggcaggacacgcagccttgtagtgccacaattgcagtatgatgtttatagcaatctcatcaatcgaatggctcaagtagccgaaagcttcgaccagtcgttgaggcaggtcaaacttttcattttgcaaaacaagattcttggcagctatttgctcgaacaaaatagggcgttggctgaaaaggaaaaggatatggatgtttttcattcagagcttatttctcaaagtaagcttgaactggaaaataccatacaaaaaatggaacaattgagcttacaaatggagacacaaagagaaggcatggaccaagccaaagaggacatggatgcaggattgcgaagtttccaaaatagaagggttgcggaagccatgtttgctgtaatcagcgctacagctgcaatcggtctcgcatttgttaccggtggtgcaacagctcctgcagctgtgacggcagcagggaacgctgtaagagcagcgggtcaagctgcaaatgcgctccaaagagtagtggaaatcttggagggcttgcaagaggtgatggcaatggtggctctgataaaggagctagtggattccttgcaagacataggtcagcttgtggaagcaccagagatgccagtgttgccaagtgaggcggaatggttcatttttgagaataatgtcgaggaagtggcagaagggatgcctacagaggtgtcggaggtgtcggcatggaagacgaggtgcaagaatgtggcagtattgggtcgggcgatggtctctacagcggcttacatatcgcagctgcagtacgacatcaaggtcgaggtgatgcggcaggagatttccaaacgccacagtgaaaggctattggccatccaaccagcagatcttagcagctatacatcactgctgacgcacatggacatgcgcaacacacgcatgttactggcgctcatcagggtgctgcacatacagaatgctgcactcatgtaccacagcctatcactgccaacccatatgaatgcatggcccgtcactatggataccgtgtggcgcatgctggtgcaacatgaacatgctgctattctaggattgttgaggttagggcccagctttgacttcatgcgcacctatgtggtgaaggatattcctgtgagcctcctgcgtgatggtgaggactgtgagttcaacatctccgtgcaagatcacttagccttcccctccacctggtctcgtgtgcgcattcatcaccttgaaatgaagtttgtgcaggaggctcatgttcaccagcctagcactcatacgggcaaagtctacatccttctccaaggctctcgcatcttccacgatcgcaacgaggatgatgtccttcattatgaggctgccatgcctctcgacttacactatgcctaccgtctcgacacaggggagactacactctccaatctgccctccaatgatttcatcaggacattcatacgcacgacaccctttactacctggagactccgcctctctgcctctgccgaagaaaatgaagggctcgactttcccactgcgcttactgccgacgccaccacccagattgcaatcactttctatgtctccgctatcaggcggatttctctctag

SEQ ID NO: 940 - DNA, 2880 bp, Coniogramme venusta Ping Wu
atgtgtctctggaaggttgagatggctgatcatgaagagcgattgacagtggctgacatggatgctgcaacagactatgattatgagtttgatcacgatgaggagtcgccagaacacctagcaaggaaggtcgagatggttgatgtggctgatgatgacgatgagtctggcatgactattgtgcatggggagtcgacagaacagttggcaaggggtactaggagtgtggattttggggccgaggagtacagagatctgaaccaggtgagtgagaggatacggttggatcagatggagttttcggaggtgatgacgattcatcggatgcacatcaagctgtcggagctggacttgggccatttagagggcgcggagaaggtgaaactcctgtacgtgtttgcggatgtggtggaggtggacgaagaggagagtggtgagctacctgtgcggtttcccggctccatgtcagtattcatactgtgtcgcgtttggcacgtcagggctttcgtaggactcgacggtcgcaaccatcaccgggttttaagcctcccgcacatgacgttgcattaccattcatcaccagctaggacgttacatcgtcttgacccagcaacactggaagatgttgccgagcctgccctgagcatatacgccgatgtcattcaagtctggttgcaaaattggcctgccgcgatacattctgtagctccattctatttcgagtcctccgactccgaggtcctacttaccaggccaaaccagcagcgtccactcgagaaaaccagccttttccgggcaaggttttttcgaaatgggattccgaatccaggcttgcctccaattaccagtcatgcatttagtgtaagggttgcagatagacaggtattgtctgggggcggatccttcccaacatcaagatattccccggcattcccaaggggtctgttaactccagatatccccgtcatcattctcacagattcccacattttgcccgccttgcagaccagccttcttatcgcagagctagtggagcttggtcgcccatcacaagccacaattgatgctgtggccagccacttgcgatggctcaacaagctcctgctaaaggtgattcacgaaacaaaaggcactgcatttcgacaggatgagtacctggagctctcatttcgtgctcagtacttgatcaagaagatggggaatatccgcagccttgtagtgcctcaattgcaatacagcgtttatagccctctcatcaatcgaatggcccaggttgcagaaagctatgaccaatcactcacgcagttccgactctttattcagcaaaacaggattctgggcagctttctgctagagcaaaacagggcctttgctcagagggaaaaagatatggatgctttccactcagagcttatctctgaaagggaaactgaattggaaaataccttggacaaaatgctccaattacactcacaaatggagcaggagagtgcagaaatggagcgagcccgacagacaatggaagaaggtatcatagatttccaaaggagaacaattttgagggccgtgttttccatattcgctgctgtagctgggcttgctcttgctttcgtaaccgctggtgcagcagctcccgccgcagtggcaggtgcaagtgctgccgtgagtgctgtgtcgaacacggttacagttgcagcagccctacaacgaatagtggacatgctacagatcttggagacggtgatggaggtggtgcgaataatcaaagaagtaatagctaatatggatcttgttgatcagcttgcggatgcaccagagatgccagagatgccatccgatcacaaatggcttatctttatgaatgacgttgacgaagtggcggaggagatacctccaggggtgtcaggggtttctgcatggagagcaagatgcaggaatgtggcagttctgggtcgagagatgataactactgcaagtttcatttcgcagctgcagtatgaaatcaaggtgcagacgatgctgcaggagattgccaaaaggcaggctcagcggttgttggccatccagctaccaagtcttaccaactttaccgagatggtaacacagatggacatgagaacaactcgcattttggtgaccctgataaaagtggtggaagtgcaaaatgcagcgcttatgtatcagtacctatcgaaacccacacaagtgaatgcatggccagttaccatggacaccttgtggagaatactggtgcaacatgagcatagtgcaattagggggctcataaggttggggccttccttcgatataaaccgtaaccatgtggtgcgtcacattccggtatacttgttgatgcatggaaaagattggcagttcgagatcccggcactgcatcatgatggtgcaactgatgatgatgatgagatggatgcatttccgtcttcgtggtcacgcgtgcgcattcatcacctggagatgaagttcgtgaaggcgccacacgtccaccagcccaccaccaaaaccggctccatctacattcttttgcagggctcgcgtatctttgaggaccgcaatcaaggtgcaagagttcactatgaagccgccacctccctagactaccactatgcctaccgcttggagacaggcgagaccacccttaccaacttcccctccatggagtttacccaaaccttcatgcgcatgacgccattcacgacatggagactgcgtctctccgcctcggcgagagaaaatgaagggcttaccttccccacggcgatcatgtctggcccgacggactcctctgaaattgacccagacgctaccactgagatcgccatcactttttccatctccgctattaggcatgtctctttctag

SEQ ID NO: 941 - DNA, 2766 bp, Coniogramme venusta Ping Wu
atgtgtctctggaaggttgagatggttgatgtggctgatgatgacgatgagtctggcatgactattgtgcatggggagtcgacagaacagttggcaaggggtactaggagtgtggattttggggccgaggagtacagagatctgaaccaggtgagtgagaggatacggttggatcagatggagttttcggaggtgatgacgattcatcggatgcacatcaagctgtcggagctggacttgggccatttagagggcgcggagaaggtgaaactcctgtacgtgtttgcggatgtggtggaggtggacgaagaggagagtggtgagctacctgtgcggtttcccggctccatgtcagtattcatactgtgtcgcgtttggcacgtcagggctttcgtaggactcgacggtcgcaaccatcaccgggttttaagcctcccgcacatgacgttgcattaccattcatcaccagctaggacgttacatcgtcttgacccagcaacactggaagatgttgccgagcctgccctgagcatatacgccgatgtcattcaagtctggttgcaaaattggcctgccgcgatacattctgtagctccattctatttcgagtcctccgactccgaggtcctacttaccaggccaaaccagcagcgtccactcgagaaaaccagccttttccgggcaaggttttttcgaaatgggattccgaatccaggcttgcctccaattaccagtcatgcatttagtgtaagggttgcagatagacaggtattgtctgggggcggatccttcccaacatcaagatattccccggcattcccaaggggtctgttaactccagatatccccgtcatcattctcacagattcccacattttgcccgccttgcagaccagccttcttatcgcagagctagtggagcttggtcgcccatcacaagccacaattgatgctgtggccagccacttgcgatggctcaacaagctcctgctaaaggtgattcacgaaacaaaaggcactgcatttcgacaggatgagtacctggagctctcatttcgtgctcagtacttgatcaagaagatggggaatattcgcagccttgtagtgcctcaattgcaatacagcgtttatagccctctcatcaatcgaatggcccaggttgcagaaagctatgaccaatcactcacgcagttccgactctttattcagcaaaacaggattctgggcagctttctgctagagcaaaacagggcctttgctcagagggaaaaagatatggatgctttccactcagagcttatctctgaaagggaaactgaattggaaaataccttggacaaaatgctccaattacactcacaaatggagcaggagagtgcagaaatggagcgagcccgacagacaatggaagaaggtatcatagatttccaaaggagaacaattttgagggccgtgttttccatattcgctgctgtagctgggcttgctcttgctttcgtaaccgctggtgcagcagctcccgccgcagtggcaggtgcaagtgctgccgtgagtgctgtgtcgaacacggttacagttgcagcagccctacaacgaatagtggacatgctacagatcttggagacggtgatggaggtggtgcgaataatcaaagaagtaatagctaatatggatcttgttgatcagcttgcggatgcaccagagatgccagagatgccatccgatcacaaatggcttatctttatgaatgacgttgacgaagtggcggaggagatacctccaggggtgtcaggggtttctgcatggagagcaagatgcaggaatgtggcagttctgggtcgagagatgataactactgcaagtttcatttcgcagctgcagtatgaaatcaaggtgcagacgatgctgcaggagattgccaaaaggcaggctcagcggttgttggccatccagctaccaagtcttaccaactttaccgagatggtaacacagatggacatgagaacaactcgcattttggtgaccctgataaaagtggtggaagtgcaaaatgcagcgcttatgtatcagtacctatcgaaacccacacaagtgaatgcatggccagttaccatggacaccttgtggagaatactggtgcaacatgagcatagtgcaattagggggctcataaggttggggccttccttcgatataaaccgtaaccatgtggtgcgtcacattccggtatacttgttgatgcatggaaaagattggcagttcgagatcccggcactgcatcatgatggtgcaactgatgatgatgatgagatggatgcatttccgtcttcgtggtcacgcgtgcgcattcatcacctggagatgaagttcgtgaaggcgccacacgtccaccagcccaccaccaaaaccggctccatctacattcttttgcagggctcgcgtatctttgaggaccgcaatcaaggtgcaagagttcactatgaagccgccacctccctagactaccactatgcctaccgcttggagacaggcgagaccacccttaccaacttcccctccatggagtttacccaaaccttcatgcgcatgacgccattcacgacatggagactgcgtctctccgcctcggcgagagaaaatgaagggcttaccttccccacggcgatcatgtctggcccgacggactcctctgaaattgacccagacgctaccactgagatcgccatcactttttccatctccgctattaggcatgtctctttctag

SEQ ID NO: 942 - DNA, 2880 bp, Coniogramme venusta Ping Wu
atgtgtctctggaaggttgagatggctgatcatgaagagcgattgacagtggctgacatggatgctgcaacagactatgattatgagtttgatcacgatgaggagtcgccagaacacctagcaaggaaggtcgagatggttgacgtggctgatgatgacgatgagtctggcatgactattgtgcatggggagtcgacagaacagttggcaaggggtactaggagtgtggattttggggccgaggagtacagagatctgaaccaggtgagtgagaggatacggttggatcagatggagttttcggaggtgatgacgattcatcggatgcgcatcaagctgtcggagctggacttgggccatttagagggcgcggagaaggtgaaactcctgtacgtgtttgcggatgtggtggaggtggacgaagaggagagtggtgagctacctgtgcggtttcccggctccatgtcagtattcatactgtgtcgcgtttggcacgtaagggctttcgtaggactcaacggtcgcaaccatcaccgggttttaagcctcccgcacatgacgttgcattataaccattcatcaccagctaggacgttacatcgtcttgacccagctacactggaagatgttgccgagcctgccctgagcatatacgccgatgtcattcaagtctggttgcaaaattggcctgccgcgatacattctgtagctccattccatttcgagtcctccgactccgaggtcctacttagcaggccaaaccggccgagtctcgagaagaccagccgtttccaggcaaggctttttcgaaatgggattccgaatccgggcttgcctccaattaccaatcatgcatttagtataagggttgcagatagacaggtattgtctgggagcggacccttcccaacatcaagatattccccggcattcccaaggggtctgttaactccagatatccccgtcgtcattctcacagattcccacattttgcccgccttgcagaccagccttcttatcgcagagctagtggagcttggtcgcccatcacaagccacaattgatgctgtggccagccacttgcgatggctcaacaagctcctgctaaaggtgattcacgaaacaaaaggcactgcatttcgacaggatgagtacctggagctctcatttcgtgctcagtacttgatcaagaagatggggaatatccgcagccttgtagtgcctcaattgcaatacagagtttatagccctctcatcaatcgaatggcccaggttgcagaaagctatgaccaatcactcacgcagttccgactctttattcagcaaaacaggattctgggcagctttctgctagagcaaaacagggcctttgctcagagggaacaagatatggatgctttccactcagagcttatctctgaaagggaaactgagttggaaaataccttggacaaaatgctccaattacactcacaaatggagcaggagagtgcagaaatggagcgagcccgacagacaatggaagaaggtatcatagatttccaaaggagaacaattttgagggccgtgttttccatatttgctgctgtagctgggcttgctcttgctttcgtaaccgctggtgcagcagctcccgccgcggtggcaggtgcaagtgctgccgtgagtgctgtgtcgaacacggttagagttgcagcagccctacaacgaatagtggacatgctacagatcttggagacggtgatggaggtggtgcgaataatcaaagaagtaatagctaatatggatcttgttgatcagcttgcggatgcaccagagatgccagagatgccatccgatcacacatggcttatctttatgaatgacgttgacgaagtggcggaggagatacctccaggggtgtcaggggtttctgcatggagagcaagatgcaggaatgtggcagttctgggtcgagagatgataactactgcaagtttcatttcgcagctgcagtatgaaatcaaggtgcagacgatgctgcaggagattgccaaaaggcaggctgagcggttgttggccatccagctaccaagtcttaccaactttaccgagatggtaacacagatggacatgagaacaactcgcattttggtgaccctgataaaagtggtggaagtgcaaaatgcagcgcttatgtatcagtacctatcgaaacccacacaagtgaatgcatggccagttaccatggacaccttgtggagaatactggtgcaacatgagcatagtgcaattagggggctcataaggttggggccttccttcgatataaaccgtaactatgtggtgcgtcacattccggtatacttgttgatgcatggaaaagattggcagttcgagatcccggcactgcatcatgatggtgcaactgatgatgatgatgagatggatgcatttccgtcttcgtggtcacgcgtgcgcattcatcacctggagatgaagttcgtgaaggcgccacacgtccaccagcccaccaccaaaaccggctccatctacattcttttgcagggctcgcgtatctttgaggaccgcaatcaaggtgcaagagttcactatgaagccgccacctccctagactaccactatgcctaccgcttggagacaggcgagaccacccttaccaacttcccctccatggagtttacccaaaccttcatgcgcatgacgccattcacgacatggagactgcgtctctccgcctcggcgagagaaaatgaagggcttaccttccccacggcgatcatgtctggcccgacggactcctctgaaattgacccagacgctaccactgagatcgccatcactttttccatctccgctattaggcatgtctctttctag

SEQ ID NO: 943 - DNA, 2871 bp, Coniogramme venusta Ping Wu
atgtgtctctggaaggttgagatggctgatcatgaagagcgattgacagtggctgacatggatgctgcaacagactatgattatgagtttgatcacgatgaggagtcgccagaacacctagcaaggaaggtcgagatggttgatgtggctgatgatgacgatgagtctggcatgactattgtgcatggggagtcgacagaacagttggcaaggagtgtggattttggggccgaggagtacagagatctgaaccaggtgagtgagaggatacggttggatcagatggagttttcggaggtgatgacgattcatcggatgcacatcaagctgtcggagctggacttgggccatttagagggcgcggagaaggtgaaactcctgtacgtgtttgcggatgtggtggaggtggacgaagaggagagtggtgagctacctgtgcggtttcccggctccatgtcagtattcatactgtgtcgcgtttggcacgtcagggctttcgtaggactcgacggtcgcaaccatcaccgggttttaagcctcccgcacatgacgttgcattaccattcatcaccagctaggacgttacatcgtcttgacccagcaacactggaagatgttgccgagcctgccctgagcatatacgccgatgtcattcaagtctggttgcaaaattggcctgccgcgatacattctgtagctccattctatttcgagtcctccgactccgaggtcctacttaccaggccaaaccagcagcgtccactcgagaaaaccagccttttccgggcaaggttttttcgaaatgggattccgaatccaggcttgcctccaattaccagtcatgcatttagtgtaagggttgcagatagacaggtattgtctgggggcggatccttcccaacatcaagatattccccggcattcccaaggggtctgttaactccagatatccccgtcatcattctcacagattcccacattttgcccgccttgcagaccagccttcttatcgcagagctagtggagcttggtcgcccatcacaagccacaattgatgctgtggccagccacttgcgatggctcaacaagctcctgctaaaggtgattcacgaaacaaaaggcactgcatttcgacaggatgagtacctggagctctcatttcgtgctcagtacttgatcaagaagatggggaatatccgcagccttgtagtgcctcaattgcaatacagcgtttatagccctctcatcaatcgaatggcccaggttgcagaaagctatgaccaatcactcacgcagttccgactctttattcagcaaaacaggattctgggcagctttctgctagagcaaaacagggcctttgctcagagggaaaaagatatggatgctttccactcagagcttatctctgaaagggaaactgaattggaaaataccttggacaaaatgctccaattacactcacaaatggagcaggagagtgcagaaatggagcgagcccgacagacaatggaagaaggtatcatagatttccaaaggagaacaattttgagggccgtgttttccatattcgctgctgtagctgggcttgctcttgctttcgtaaccgctggtgcagcagctcccgccgcagtggcaggtgcaagtgctgccgtgagtgctgtgtcgaacacggttacagttgcagcagccctacaacgaatagtggacatgctacagatcttggagacggtgatggaggtggtgcgaataatcaaagaagtaatagctaatatggatcttgttgatcagcttgcggatgcaccagagatgccagagatgccatccgatcacaaatggcttatctttatgaatgacgttgacgaagtggcggaggagatacctccaggggtgtcaggggtttctgcatggagagcaagatgcaggaatgtggcagttctgggtcgagagatgataactactgcaagtttcatttcgcagctgcagtatgaaatcaaggtgcagacgatgctgcaggagattgccaaaaggcaggctcagcggttgttggccatccagctaccaagtcttaccaactttaccgagatggtaacacagatggacatgagaacaactcgcattttggtgaccctgataaaagtggtggaagtgcaaaatgcagcgcttatgtatcagtacctatcgaaacccacacaagtgaatgcatggccagttaccatggacaccttgtggagaatactggtgcaacatgagcatagtgcaattagggggctcataaggttggggccttccttcgatataaaccgtaaccatgtggtgcgtcacattccggtatacttgttgatgcatggaaaagattggcagttcgagatcccggcactgcatcatgatggtgcaactgatgatgatgatgagatggatgcatttccgtcttcgtggtcacgcgtgcgcattcatcacctggagatgaagttcgtgaaggcgccacacgtccaccagcccaccaccaaaaccggctccatctacattcttttgcagggctcgcgtatctttgaggaccgcaatcaaggtgcaagagttcactatgaagccgccacctccctagactaccactatgcctaccgcttggagacaggcgagaccacccttaccaacttcccctccatggagtttacccaaaccttcatgcgcatgacgccattcacgacatggagactgcgtctctccgcctcggcgagagaaaatgaagggcttaccttccccacggcgatcatgtctggcccgacggactcctctgaaattgacccagacgctaccactgagatcgccatcactttttccatctccgctattaggcatgtctcattctag

SEQ ID NO: 944 - DNA, 2880 bp, Coniogramme venusta Ping Wu
atgtgtctctggaaggttgagatggctgatcatgaagagcgattgacagtggctgacatggatgctgcaacagactatgattatgagtttgatcacgatgaggagtcgccagaacacctagcaaggaaggtcgagatggttgatgtggctgatgatgacgatgagtctggcatgactattgtgcatggggagtcgacagaacagttggcaaggggtactaggagtgtggattttggggccgaggagtacagagatctgaaccaggtgagtgagaggatacggttggatcagatggagttttcggaggtgatgacgattcatcggatgcacatcaagctgtcggagctggacttgggccatttagagggcgcggagaaggtgaaactcctgtacgtgtttgcggatgtggtggaggtggacgaagaggagagtggtgagctacctgtgcggtttcccggctccatgtcagtattcatactgtgtcgcgtttggcacgtcagggctttcgtaggactcgacggtcgcaaccatcaccgggttttaagcctcccgcacatgacgttgcattaccattcatcaccagctaggacgttacatcgtcttgacccagcaacactggaagatgttgccgagcctgccctgagcatatacgccgatgtcattcaagtctggttgcaaaattggcctgccgcgatacattctgtagctccattctatttcgagtcctccgactccgaggtcctacttaccaggccaaaccagcagcgtccactcgagaaaaccagccttttccgggcaaggttttttcgaaatgggattccgaatccaggcttgcctccaattaccagtcatgcatttagtgtaagggttgcagatagacaggtattgtctgggggcggatccttcccaacatcaagatattccccggcattcccaaggggtctgttaactccagatatccccgtcatcattctcacagattcccacattttgcccgccttgcagaccagccttcttatcgcagagctagtggagcttggtcgcccatcacaagccacaattgatgctgtggccagccacttgcgatggctcaacaagctcctgctaaaggtgattcacgaaacaaaaggcactgcatttcgacaggatgagtacctggagctctcatttcgtgctcagtacttgatcaagaagatggggaatattcgcagccttgtagtgcctcaattgcaatacagcgtttatagccctctcatcaatcgaatggcccaggttgcagaaagctatgaccaatcactcacgcagttccgactctttattcagcaaaacaggattctgggcagctttctgctagagcaaaacagggcctttgctcagagggaaaaagatatggatgctttccactcagagcttatctctgaaagggaaactgaattggaaaataccttggacaaaatgctccaattacactcacaaatggagcaggagagtgcagaaatggagcgagcccgacagacaatggaagaaggtatcatagatttccaaaggagaacaattttgagggccgtgttttccatattcgctgctgtagctgggcttgctcttgctttagtaaccgctggtgcagcagctcccgccgcagtggcaggtgcaagtgctgccgtgagtgctgtgtcgaacacggttacagttgcagcagccctacaacgaatagtggacatgctacagatcttggagacggtgatggaggtggtgcgaataatcaaagaagtaatagctaatatggatcttgttgatcagcttgcggatgcaccagagatgccagagatgccatccgatcacaaatggcttatctttatgaatgacgttgacgaagtggcggaggagatacctccaggggtgtcaggggtttctgcatggagagcaagatgcaggaatgtggcagttctgggtcgagagatgataactactgcaagtttcatttcgcagctgcagtatgaaatcaaggtgcagacgatgctgcaggagattgccaaaaggcaggctcagcggttgttggccatccagctaccaagtcttaccaactttaccgagatggtaacacagatggacatgagaacaactcgcattttggtgaccctgataaaagtggtggaagtgcaaaatgcagcgcttatgtatcagtacctatcgaaacccacacaagtgaatgcatggccagttaccatggacaccttgtggagaatactggtgcaacatgagcatagtgcaattagggggctcataaggttggggccttccttcgatataaaccgtaaccatgtggtgcgtcacattccggtatacttgttgatgcatggaaaagattggcagttcgagatcccggcactgcatcatgatggtgcaactgatgatgatgatgagatggatgcatttccgtcttcgtggtcacgcgtgcgcattcatcacctggagatgaagttcgtgaaggcgccacacgtccaccagcccaccaccaaaaccggctccatctacattcttttgcagggctcgcgtatctttgaggaccgcaatcaaggtgcaagagttcactatgaagccgccacctccctagactaccactatgcctaccgcttggagacaggcgagaccacccttaccaacttcccctccatggagtttacccaaaccttcatgcgcatgacgccattcacgacatggagactgcgtctctccgcctcggcgagagaaaatgaagggcttaccttccccacggcgatcatgtctggcccgacggactcctctgaaattgacccagacgctaccactgagatcgccatcactttttccatctccgctattaggcatgtctctttctag

SEQ ID NO: 945 - DNA, 2880 bp, Coniogramme venusta Ping Wu
atgtgtctctggaaggttgagatggctgatcatgaagagcgattgacagtggctgacatggatgctgcaacagactatgattatgagtttgatcacgatgaggagtcgccagaacacctagcaaggaaggtcgagatggttgacgtggctgatgatgacgatgagtctggcatgactattgtgcatggggagtcgacagaacagttggcaaggggtactaggagtgtggattttggggccgaggagtacagagatctgaaccaggtgagtgagaggatacggttggatcagatggagttttcggaggtgatgacgattcatcggatgcgcatcaagctgtcggagctggacttgggccatttagagggcgcggagaaggtgaaactcctgtacgtgtttgcggatgtggtggaggtggacgaagaggagagtggtgagctacctgtgcggtttcccggctccatgtcagtattcatactgtgtcgcgtttggcacgtaagggctttcgtaggactcaacggtcgcaaccatcaccgggttttaagcctcccgcacatgacgttgcattataaccattcatcaccagctaggacgttacatcgtcttgacccagctacactggaagatgttgccgagcctgccctgagcatatacgccgatgtcattcaagtctggttgcaaaattggcctgccgcgatacattctgtagctccattccatttcgagtcctccgactccgaggtcctacttagcaggccaaaccggccgagtctcgagaagaccagccgtttccaggcaaggctttttcgaaatgggattccgaatccgggcttgcctccaattaccaatcatgcatttagtataagggttgcagatagacaggtattgtctgggagcggacccttcccaacatcaagatattccccggcattcccaaggggtctgttaactccagatatccccgtcgtcattctcacagattcccacattttgcccgccttgcagaccagccttcttatcgcagagctagtggagcttggtcgcccatcacaagccacaattgatgctgtggccagccacttgcgatggctcaacaagctcctgctaaaggtgattcacgaaacaaaaggcactgcatttcgacaggatgagtacctggagctctcatttcgtgctcagtacttgatcaagaagatggggaatatccgcagccttgtagtgcctcaattgcaatacagagtttatagccctctcatcaatcgaatggcccaggttgcagaaagctatgaccaatcactcacgcagttccgactctttattcagcaaaacaggattctgggcagctttctgctagagcaaaacagggcctttgctcagagggaaaaagatatggatgctttccactcagagcttatctctgaaagggaaactgaattggaaaataccttggacaaaatgctccaattacactcacaaatggagcaggagagtgcagaaatggagcgagcccgacagacaatggaagaaggtatcatagatttccaaaggagaacaattttgagggccgtgttttccatattcgctgctgtagctgggcttgctcttgctttcgtaaccgctggtgcagcagctcccgccgcagtggcaggtgcaagtgctgccgtgagtgctgtgtcgaacacggttacagttgcagcagccctacaacgaatagtggacatgctacagatcttggagacggtgatggaggtggtgcgaataatcaaagaagtaatagctaatatggatcttgttgatcagcttgcggatgcaccagagatgccagagatgccatccgatcacaaatggcttatctttatgaatgacgttgacgaagtggcggaggagatacctccaggggtgtcaggggtttctgcatggagagcaagatgcaggaatgtggcagttctgggtcgagagatgataactactgcaagtttcatttcgcagctgcagtatgaaatcaaggtgcagacgatgctgcaggagattgccaaaaggcaggctcagcggttgttggccatccagctaccaagtcttaccaactttaccgagatggtaacacagatggacatgagaacaactcgcattttggtgaccctgataaaagtggtggaagtgcaaaatgcagcgcttatgtatcagtacctatcgaaacccacacaagtgaatgcatggccagttaccatggacaccttgtggagaatactggtgcaacatgagcatagtgcaattagggggctcataaggttggggccttccttcgatataaaccgtaaccatgtggtgcgtcacattccggtatacttgttgatgcatggaaaagattggcagttcgagatcccggcactgcatcatgatggtgcaactgatgatgatgatgagatggatgcatttccgtcttcgtggtcacgcgtgcgcattcatcacctggagatgaagttcgtgaaggcgccacacgtccaccagcccaccaccaaaaccggctccatctacattcttttgcagggctcgcgtatctttgaggaccgcaatcaaggtgcaagagttcactatgaagccgccacctccctagactaccactatgcctaccgcttggagacaggcgagaccacccttaccaacttcccctccatggagtttacccaaaccttcatgcgcatgacgccattcacgacatggagactgcgtctctccgcctcggcgagagaaaatgaagggcttaccttccccacggcgatcatgtctggcccgacggactcctctgaaattgacccagacgctaccactgagatcgccatcactttttccatctccgctattaggcatgtctctttctag

SEQ ID NO: 946 - DNA, 2628 bp, Lecanopteris sinuosa
atggagtatagctccttgtactcaaacccgagcctggtgaaccccaacctgcaagccacggagttctcggaagtgatggtggtgcatcgcatgcacgtctccctctcccagctcgacattaacacggccgatagcgtcactcgacccacgctgctggaaggcagcgacaaggtcaagcgcttgttcattgtggcggatgtcgtcgaggtgcctaccgcttatgtcttcctgcctgccagcctgtcggtggtcatcctgtgccgcctgctccatgtcaccgttcctcccacccatcacctgcatggcccctccgtatccctcaccttcccctttatgcggtttttcatcaatgagtttatcgcggatttctttccgtccaaggatgatgatgcagagattggctgttatatctatgccgatcgcatcatccgtcgattagccacctcgccgtcggatcgacgtttgcgtttagtcatggttgcggaaggtccttccgttttctccagggacaactggcctatcagccgttttgaatttacacaagacaccgttacgccagacgaacccctgtctatggcagactctgagctgcagaggtcggacgagtacgagctacaggacggcacaatccagtttcccttggccgtcatcacattctccccgctgctgccacccagcacgtctgcaatgggcagagggcttgacactgctcgtccgcctgtattctgctacttccaattccgctcagatgttccctcccatgttcttaccaacccacacgttgtgttgggcatgcaaatgaccatgctttttgcagagcttgtccaggtcgcccataatgcgccccgcgtgctcaagcttgttacgaggcatgttgaatggctcaacaagctcttgcgtcaggtggcgtccccaaatgatgatatcttaggcctcttgttccgagtgcaagtcttcaagaggacagctgagcagggacgcggctatctggtgccgatgctgcagtaccatatgtacagcaacctcattgaccgcatggtacaagccggggaggcttacgatcgagatctgaagaatcttcagttcttcattgcaacaaatcagatcttgggcaactacctgctacagcaaaatagggcttttgcagagagggagagagaaatgagtggtttccactcgaatgtcgtggaaatgcgaagggatgagctccggaatgccttgaataagatggacctgttagcattgcaaatggaaagggagaatacagcaatggaggaagcaagggaagcattggacaaagcaattctggagtatcaaaggagacagatggcaaatgccattctttctgtggttcgtgcggtggtaggtgttgctcttgcatttgccactgcgggtgcaacattagcaggggcagtggcatcagcaggacaggcggtgtcagcggcgggtcaagcagcagcaagtctcgccaaggttgtggccaccttggaagcattggaaggagtcatggagtttgtgatagccttacgagaggttgcagactcgctcgggagcatgaataacttagtaaatgcaccggagcagccagagttgccctcagatgcagactggtcaatttttgtgaatgagatagaggcagtggcagggcagatgccagaagaagtggtgggaccggtgtcagtgtggcaggcgaagtgcaagaacgtggcagtgctgggccgagagatgtgcaccacaacagcacatattggagagctaactcatcagatcaaggtggaagaaatgttgcaagagattgccctgcgccaggcagaccggctcgatgcaatatcttccccacaagatctctccagcttcacagagatgttgtcggagattgacatgcggtcactgcgattgctcctccagctcatcaagctgttgtacattcagaatccagcactcaagtatgaatacctgtttacaaccaccgagtccctggacacatggccagtgagcatggagacggtgcgcaatgtgctcatacggcaggaggcccgagctatccaaggcttgcttcaactaggggtttctaatgatcacactctcacctacgtcgccagtggcatacctgtcggattgctagttgaggggcatgattgggtgttttcatttcctgttcacaatttcgatgtcttccccgaagggttttcgcgagttcgcatacgctatgtcgagctcaagttcgatgctgctggtcaacaagcagaggggggcatgatccaccttcccagcaccaacactggcttactttatttgctcttacagtgctcaccaagctttgcagatcgcaagcaacaggagatgttgggttacgaggcaacctcaggggtcgcctatgcatatgcctacaacctgcaaaccggagagcccactcttaccaacatcccctccccggagtttgctaacacattcatgcgcatgacccccttcaacacatggagagtccgcctctctgcttctgcccccgaaaatcaaggtctatcatttctcacagccgactcccccgatgatactacccagattgccatcaccttccatttcagtgctgttcgaaggatacatatgcgtgaagccgaggacttttaa

SEQ ID NO: 947 - DNA, 2628 bp, Lecanopteris sinuosa
atggagtatagctccttgtactcaaacccgagcctggtgaaccccaacctgcaagccacggagttctcggaagtgatggtggtgcatcgcatgcacgtctccctctcccagctcgacattaacacggccgatagcgtcactcgacccacgctgctggaaggcagcgacaaggtcaagcgcttgttcattgtggcggatgtcgtcgaggtgcctaccgctcatgtcttcctgcctgccagcctgtcggtggtcatcctgtgccgcctgctccatgtcaccgttcctcccacccatcacctgcatggcccctccgtatccctcaccttcccctttatgcggtttttcatcaatgagtttatcgcggatttctttccgtccaaggatgatgatgccgagattggctgctatatctatgccgatcgcatcatccgtcgattagccacctcgccgtcggatcgacgtttgcgtttagtcatggttgcggaaggcccttccgttttctccagggacaactggcctatcagccgttttgaatttacacaagacaccgtcacgccagacgaacccctgtctatggcagactctgagctgcagaggtcggacgagtacgagctacaggacggcacaatccagtttcccttggccgtcatcacattctccccgctgctgccacccagcacgtctgcaatgggcagagggcttgacactgctcgtccgcctgtattctgctacttccaattccgctcagatgttccctcccatgtccttaccaacccacacgttgtgttgggcatgcaaatgaccatgctttttgcagagcttgtccaggtcgcccataatgcgccccgcgtgctcaagcttgttacgaggcatgttgtatggctcaacaagctcttgcgtcaggtggcgtccccaaatgatgatatcttaggcctcttgttccgagtgcaagtcttcaagaggacagctgagcagggacgcggctatctggtgccgatgctgcagtaccatatgtacagcaacctcattgaccgcatggtacaagccggggaggcttacgatcgagatctgaagaatcttcagttcttcattgcaacaaatcagatcttgggcaactacctgctacagcaaaatagggcttttgcagagagggagagagaaatgagtggtttccactcgaatgtcgtggaaatgcgaagggatgagctccggaatgccttgaataagatggacctgttagcattgcaaatggaaagggagaatacagcaatggaggaagcaagggaagcattggacaaagcaattctggagtatcaaaggagacagatggcaaatgccattctttctgtggttcgtgcggtggtaggtgttgctcttgcatttgccactgcgggtgcaacattagcaggggcagtggcatcagcaggacaggcggtgtcagcggcgggtcaagcagcagcaagtctcgccaaggttgtggccaccttggaagcattggaaggagtcatggagtttgtgatagccttacgagaggttgcagactcgctcgggagcatgaataacttagtaaatgcaccggagcagccagagttgccctcagatgcagactggtcaatttttgtgaatgagatagaggcagtggcagggcagatgccagaagaagtggtgggaccggtgtcagtgtggcaggcgaagtgcaagaacgtggcagtgctgggccgagagatgtgcaccacaacagcacatattggagagctaactcatcagatcaaggtggaagaaatgttgcaagagattgccctgcgccaggcagaccggctcgatgcaatatcttccccacaagatctctccagcttcacagagatgttgtcggagattgacatgcggtcactgcgattgctcctccagctcatcaagctgttgtacattcagaatccagcactcaagtatgaatacctgtttacaaccaccgagtccctggacacatggccagtgagcatggagacggtgcgcaatgtgctcatacggcaggaggcccgagctatccaaggcttgcttcaactaggggtttctaatgatcacactctcacctacgtcgccagtggcatacctgtcggattgctagttgaggggcatgattgggtgttttcatttcctgttcacaatttcgatgtcttccccgaagggttttcgcgagttcgcatacgctatgtcgagctcaagttcgatgctgctggtcaacaagcagaggggggcatgatccaccttcccagcaccaacactggcttactttatttgctcttacagtgctcaccaagctttgcagatcgcaagcaacaggagatgttgggttacgaggcaacctcaggggtcgcctatgcatatgcctacaacctgcaaaccggagagcccactcttaccaacatcccctcccccgagtttgctaacacattcatgcgcatgacccccttcaacacatggagagtccgcctctctgcttctgcccccgaaaatcaaggtctatcatttctcacagccgactcccccgatgatactacccagattgccatcaccttccatttcagtgctgttcgaaggatacatacgcgtgaagccgaggacttttaa

SEQ ID NO: 948 - DNA, 2628 bp, Lecanopteris sinuosa
atggagtatagctccttgtactcaaacccgagcctggtgaaccccaacctgcaagccacggagttctcggaagtgatggtggtgcatcgcatgcacgtctccctctcccagctcgacattaacacggccgatagcgtcactcgacccacgctgctggaaggcagcgacaaggtcaagcgcttgttcattgtggcggatgtcgtcgaggtgcctaccgctcatgtcttcctgcctgccagcctgtcggtggtcatcctgtgccgcctgctccatgtcaccgttcctcccacccatcacctgcatggcccctccgtatccctcaccttcccctttatgcggtttttcatcaatgagtttatcgcggatttctttccgtccaaggatgatgatgcagagattggctgttatatctatgccgatcgcatcatccgtcgattagccacctcgccgtcggatcgacgtttgcgtttagtcatggttgcggaaggcccttccgttttctccagggacaactggcctatcagccgttttgaatttacacaagacaccgttacgccagacgaacccctgtctatggcagactctgagctgcagaggtcggacgagtacgagctacaggacggcacaatccagtttcccttggccgtcatcacattctccccgctgctgccacccagcacgtctgcaatgggcagagggcttgacactgctcgtccgcctgtattctgctacttccaattccgctcagatgttccctcccatgttcttaccaacccacacgttgtgttgggcatgcaaatgaccatgctttttgcagagcttgtccaggtcgcccataatgcgccccgcgtgctcaagcttgttacgaggcatgttgaatggctcaacaagctcttgcgtcaggtggcgtccccaaatgatgatatcttaggcctcttgttccgagtgcaagtcttcaagaggacagctgagcagggacgcggctatctggtgccgatgctgcagtaccatatgtacagcaacctcattgaccgcatggtacaagccggggaggcttacgatcgagatctgaagaatcttcagttcttcattgcaacaaatcagatcttgggcaactacctgctacagcaaaatagggcttttgcagagagggagagagaaatgaatggtttccactcgaatgtcgtggaaatgcgaagggatgagctccggaatgccttgaataagatggacctgttagcattgcaaatggaaagggagaatacagcaatggaggaagcaagggaagcattggacaaagcaattctggagtatcaaaggagacagatggcaaatgccattctttctgtggttcgtgcggtggtaggtgttgctcttgcatttgccactgcgggtgcaacattagcaggggcagtggcatcagcaggacaggcggtgtcagcggcgggtcaagcagcagcaagtctcgccaaggttgtggccaccttggaagcattggaaggagtcatggagtttgtgatagccttacgagaggttgcagactcgctcgggagcatgaataacttagtaaatgcaccggagcagccagagttgccctcagatgcagactggtcaatttttgtgaatgagatagaggcagtggcagggcagatgccagaagaagtggtgggaccggtgtcagtgtggcaggcgaagtgcaagaacgtggcagtgctgggccgagagatgtgcaccacaacagcacatattggagagctaactcatcagatcaaggtggaagaaatgttgcaagagattgccctgcgccaggcagaccggctcgatgcaatatcttccccacaagatctatccagcttcacagagatgttgtcggagattgacatgcggtcactgcgattgctcctccagctcatcaagctgttgtacattcagaatccagcactcaagtatgaatacctgtttacaaccaccgagtccctggacacatggccagtgagcatggagacggtgcgcaatgtgctcatacggcaggaggcccgagctatccaaggcttgcttcaactaggggtttctaatgatcacactctcacctacgtcgccagtggcatacctgtcggattgctagttgaggggcatgattgggtgttttcatttcctgttcacaatttcgatgtcttccccgaagggttttcgcgagttcgcatacgctatgtcgagctcaagttcgatgctgctggtcaacaagcagaggggggcatgatccaccttcccagcaccaacactggcttactttatttgctcttacagtgctcaccaagctttgcagatcgcaagaaccaggagatgttgggttacgaggcaacctcaggggtcgcctatgcatatgcctacaacctgcaaaccggagagcccactcttaccaacatcccctccccggagtttgctaacacattcatgcgcatgacccccttcaacacatggagagtccgcctctctgcttctgcccccgaaaatcaaggtctatcatttctcacagccgactcccccgatgatactacccagattgccatcaccttccatttcagtgctgttcgaaggatacatacgcgtgaagccgaggacttttaa

SEQ ID NO: 949 - DNA, 2628 bp, Lecanopteris sinuosa
atggagtatagctccttgtactcaaacccgagcctggtgaaccccaacctgcaagccacggagttctcggaagtgatggtggtgcatcgcatgcacgtctccctctcccagctcgacattaacacggccgatagcgtcactcgacccacgctgctggaaggcagcgacaaggtcaagcgcttgttcattgtggcggatgtcgtcgaggtgcctaccgcttatgtcttcctgcctgccagcctgtcggtggtcatcctgtgccgcctgctccatgtcaccgttcctcccacccatcacctgcatggcccctccgtatccctcactttcccctttatgcggtttttcatcaatgagtttatcgcggatttctttccgtccaaggatgatgatgcagagattggctgttatatctatgccgatcgcatcatccgtcgattagccacctcgccgtcggatcgacgtttgcgtttagtcatggttgcggaaggtccttccgttttctccagggacaactggcctatcagccgttttgaatttacacaagacaccgttacgccagacgaacccctgtctatggcagactctgagctgcagaggtcggacgagtacgagctacaggacggcacaatccagtttcccttggccgtcatcacattctccccgctgctgccacccagcacgtctgcaatgggcagagggcttgacactgctcgtccgcctgtattctgctacttccaattccgctcagatgttccctcccatgttcttaccaacccacacgttgtgttgggcatgcaaatgaccatgctttttgcagagcttgtccaggtcgcccataatgcgccccgcgtgctcaagcttgttacgaggcatgttgaatggctcaacaagctcttgcgtcaggtggcgtccccaaatgatgatatcttaggcctcttgttccgagtgcaagtcttcaagaggacagctgagcagggacgcggctatctggtgccgatgctgcagtaccatatgtacagcaacctcattgaccgcatggtacaagccggggaggcttacgatcgagatctgaagaatcttcagttcttcattgcaacaaatcagatcttgggcaactacctgctacagcaaaatagggcttttgcagagagggagagagaaatgagtggtttccactcgaatgtcgtggaaatgcgaagggatgagctccggaatgccttgaataagatggacctgttagcattgcaaatggaaagggagaatacagcaatggaggaagcaagggaagcattggacaaagcaattctggagtatcaaaggagacagatggcaaatgccattctttctgtggttcgtgcggtggtaggtgttgctcttgcatttgccactgcgggtgcaacattaacaggggcagtggcatcagcaggacaggcggtgtcagcggcgggtcaagcagcagcaagtcttgccaaggttgtggccaccttggaagcattggaaggagtcatggagtttgtgatagccttacgagaggttgcagactcgctcgggagcatgaataacttagtaaatgcaccggagcagccagagttgccctcagatgcagactggtcaatttttgtgaatgagatagaggcagtggcagggcagatgccagaagaagtggtgggaccggtgtcagtgtggcaggcgaagtgcaagaacgtggcagtgctgggccgagagatgtgcaccacaacagcacatattggagagctaactcatcagatcaaggtggaagaaatgttgcaagagattgccctgcgccaggcagaccggctcgatgcaatatcttccccacaagatctatccagcttcacagagatgttgtcggagattgacatgcggtcactgcgattgcttctccagctcatcaagctgttgtacattcagaatccagcactcaagtatgaatacctgtttacaaccaccgagtccctggacacatggccagtgagcatggagacagtgcgcaatgtgctcatacggcaggaggcccgagctatccaaggcttgcttcaactaggggtttctaatgatcacactctcacctacgtcgccagtggcatacctgtcggattgctagttgaggggcatgattgggtgttttcatttcctgttcacaatttcgatgtcttccccgaagggttttcgcgagttcgcatacgctatgtcgagctcaagttcgatgctgctggtcaacaagcagaggggggcatgatccaccttcccagcaccaacactggcttactttatttgctcttacagtgctcaccaagctttgcagatcgcaagaaccaggagatgttgggttacgaggcaacctcaggggtcgcctatgcatatgcctacaacctgcaaaccggagagcccactcttaccaacatcccctccccggagtttgctaacacattcatgcgcatgacccccttcaacacatggagagtccgcctctctgcttctgcccccgaaaatcaaggtctatcatttctcacagccgactcccccgatgatactacccagattgccatcaccttccatttcagtgctgttcgaaggatacatacgcgtgaagccgaggacttttaa

SEQ ID NO: 950 - DNA, 2628 bp, Lecanopteris sinuosa
atggagtatagctccttgtactcaaacccgagcctggtgaaccccaacctgcaagccacggagttctcggaagtgatggtggtgcatcgcatgcacgtctccctctcccagctcgacattaacacggccgatagcgtcactcgacccacgctgctggaaggcagcgacaaggtcaagcgcttgttcattgtggcggatgtcgtcgaggtgcctaccgcttatgtcttcctgcctgccagcctgtcggtggtcatcctgtgccgcctgctccatgtcaccgttcctcccacccatcacctgcatggcccctccgtatccctcaccttcccctttatgcggtttttcatcaatgagtttatcgcggatttctttccgtccaaggatgatgatgcagagattggctgttatatctatgccgatcgcatcatccgtcgattagccacctcgccgtcggatcgacgtttgcgtttagtcatggttgcggaaggtccttccgttttctccagggacaactggcctatcagccgttttgaatttacacaagacaccgttacgccagacgaacccctgtctatggcagactctgagctgcagaggtcggacgagtacgagctacaggacggcacaatccagtttcccttggccgtcatcacattctccccgctgctgccacccagcacgtctgcaatgggcagagggcttgacactgctcgtccgcctgtattctgctacttccaattccgctcagatgttccctcccatgttcttaccaacccacacgttgtgttgggcatgcaaatgaccatgctttttgcagagcttgtccaggtcgcccataatgcgccccgcgtgctcaagcttgttacgaggcatgttgaatggctcaacaagctcttgcgtcaggtggcgtccccaaatgatgatatcttaggcctcttgttccgagtgcaagtcttcaagaggacagctgagcagggacgcggctatctggtgccgatgctgcagtaccatatgtacagcaacctcattgaccgcatggtacaagccggggaggcttacgatcgagatctgaagaatcttcagttcttcattgcaacaaatcagatcttgggcaactacctgctacagcaaaatagggcttttgcagagagggagagagaaatgagtggtttccactcgaatgtcgtggaaatgcgaagggatgagctccggaatgccttgaataagatggacctgttagcattgcaaatggaaagggagaatacagcaatggaggaagcaagggaagcattggacaaagcaattctggagtatcaaaggagacagatggcaaatgccattctttctgtggttcgtgcggtggtaggtgttgctcttgcatttgccactgcgggtgcaacattaacaggggcagtggcatcagcaggacaggcggtgtcagcggcgggtcaagcagcagcaagtcttgccaaggttgtggccaccttggaagcattggaaggagtcatggagtttgtgatagccttacgagaggttgcagactcgctcgggagcatgaataacttagtaaatgcaccggagcagccagagttgccctcagatgcagactggtcaatttttgtgaatgagatagaggcagtggcagggcagatgccagaagaagtggtgggaccggtgtcagtgtggcaggcgaagtgcaagaacgtggcagtgctgggccgagagatgtgcaccacaacagcacatattggagagctaactcatcagatcaaggtggaagaaatgttgcaagagattgccctgcgccaggcagaccggctcgatgcaatatcttccccacaagatctatccagcttcacagagatgttgtcggagattgacatgcggtcactgcgattgcttctccagctcatcaagctgttgtacattcagaatccagcactcaagtatgaatacctgtttacaaccaccgagtccctggacacatggccagtgagcatggagacagtgcgcaatgtgctcatacggcaggaggcccgagctatccaaggcttgcttcaactaggggtttctaatgatcacactctcacctacgtcgccagtgacatacctgtcggattgctagttgaggggcatgattgggtgttttcatttcctgttcacaatttcgatgtcttccccgaagggttttcgcgagttcgcatacgctatgtcgagctcaagttcgatgctgctggtcaacaagcagaggggggcatgatccaccttcccagcaccaacactggcttactttatttgctcttacagtgctcaccaagctttgcagatcgcaagaaccaggagatgttgggttacgaggcaacctcaggggtcgcctatgcatatgcctacaacctgcaaaccggagagcccactcttaccaacatcccctccccggagtttgctaacacattcatgcgcatgacccccttcaacacatggagagtccgcctctctgcttctgcccccgaaaatcaaggtctatcatttctcacagccgactcccccgatgatactacccagattgccatcaccttccatttcagtgctgttcgaaggatacatacgcgtgaagccgaggacttttaa

SEQ ID NO: 951 - DNA, 2664 bp, Cyrtomium clivicola fortuni
atggagtatagcagcttgtatggtgatgtgaaccaagtgagcctgaggttccagaacactgagttctctgaggtcatggtggtgcatcggatgtatgtgcgcctggaggagcttgacatgacgggggtggagggcatcgagaaggtgaaacgcctgtacgtgctggcggacgtggtggagctgccttccagagccaccacggtgtttgagagtttgcgccttcccgctaccatttcagcgattatcctctgccgcgttctatatatccctgaagttcagaggctctccggctcgtctttcgttgctcaatgctcgctcaacttcccatttatgcgcctccatgtcgtcggaagaagcgagggtggttcgggtgttctgcaagccttttcctccgacgccaccgccagcaatattggcgtctacctccatgctgaccgcttcatctaccgccaggccacatctccggccagcgactttgtctttcccctggatgtaagggtcagctttggcagctctaccttctccacagacgccgctcccgactggcaaaaccttaatgtctccagcatccagtacgggccacagaacctgtccaggggcccacccctcacatcctcagactctgacttgcagagatctgacgagatcgagctcctggcccggcaagatatttggagccctcttctacacgttgcgtttaacccgaatgcaccacctggcaacgtcccaggtacgcagggactattccaaccctcctctgcatgcagcttcttccatgtgccaccaccggatgtccctgcaaacgtgctcagtgatccttccatcatcttgggcatgcaaatgaacatgctcattgccgagcttgtcttggctgctcacaattcgccgcaagtcatgaacgtcatcactaagcatgtgctatggctcaacaagatcttgcttcaggttgcttcacccaatgatgatattttagcactcttgtttcgtacccaagcattcatgaagatggcaaagcaaccgcggtttgtggttccacggttgcagtaccacatgtacagtagtcttatcaatcgaatggtgcaagtagcccagaattatgaccaggagctcaagcaactcaagcttttcattgcacaaaatgagattttgggaagctatttgctagaacaaaataaggcttttgcagaaagggagaaggaaatgagtgcttttcactcgcaagtcgtgtcgatgaggacctctgagcttaggtctgccatagaatcgatgaatacgctgagtttgcaaatgcaaacagagagtgaggcgatgaacgaagcccaggagaacatggttgaagcaattcaagaatatgaaaggaaattacttgcaagagctctattttcagtgattgcggcaatagcaagtgttgctcttgcatttgccactggtggtgcaactgcaccaggggcagtggcagcagccggacgggctgtcactgcagcaggtaggttggcagaagggctccaaaaggttgtggacatcctacaaggcttgcaagcagtcatggaggttgtggtagccataagagacatcgtagaatcattggaaaacatgggtcaactagtagcagctcccgagatgccagagatgccaacagattcggactggttaatttttgtaaatgaggtggaggcagtggcagagcaagtgccaacagaagtggcagaggtcccagtgtggaaggctaagtgcaagaatgtggccgtgctaggtcaagcgatgtgcaccacagcagcatatattagtgagctacagtatgagataacggtggaagggatgctacaagagattgcacaacgtcaagcagacaggttagtggggatatcagcagcagatctattgagctacacagagatggcatcacaaatagacatgcgcacaacccgaatcctccttgagctcatcaagatgttgtacattcaaaatgcagcaattaagtatgagtacttgtatgatgctaatgagaagcttaattcatggccagtgagcatggagactgtatggaccatgctcatgcaacaagagagtgcagctctcttgggcttgctaaacttggggcccaccaatgatttcacagtaacccatgttgttaaagacatacctgtcaaggtgttagtagatggttatgattggaattttgagatcgcggtggaggattttgcaatctttccatcaggattgtctcgtgttcgcgtacgatatgttgagcttaaatttgaccaacaaggtactgatggtaggaacattgtcatccaccagcctagcactaacactggtttagtctacatgctcttacaaggctctcgtttcctccatgaccgcaaacgtgaggaggtgatggactatgaggcaagcatgggacctgtatatgcatatgcctatgacctcaacactggtgcaaccactctcaccaacatcccctcacaggaccatgccaacacatttatgcaaatgacaaccttcaatacttggagacttcgcctctctgcctctgctatggaaaatcagggattggtgtttcctacagccacttctcctgacagtactacccaaatttccatcacattctatgtcactgccattcgacgcatagattatcgacaagaggatgatgtggagtaa

SEQ ID NO: 952 - DNA, 2664 bp, Cyrtomium clivicola fortuni
atggagtatagcagcttgtatggtgatgtgaaccaagtgagcctgaggttccagaacactgagttctctgaggtcatggtggtgcatcggatgtatgtgcgcctggaggagcttgacatgacgggggtggagggcatcgagaaggtgaaacgcctgtacgtgctggcggacgtggtggagctgccttccagagccaccacggtgtttgagagtttgcgccttcccgctaccatttcagcgattatcctctgccgcgttctatatatccctgaagttcagaggctctccggctcgtctttcgttgctcaatgctcgctcaacttcccatttatgcgcctccatgtcgtcggaagaagcgagggtggttcgggtgttctgcaagccttttcctccgacgccaccgccagcaatattggcgtctacctccatgctgaccgcttcatctaccgccaggccacatctccggccagcgactttgtctttcccctggatgtaagggtcagctttggcagctctaccttctccacagacgccgctcccgactggcaaaaccttaatgtctccagcatccagtacgggccacagaacctgtccaggggcccacccctcacatcctcagactctgacttgcagagatctgacgagatcgagctcctggcccggcaagatatttggagccctcttctacacgttgcgtttaacccgaatgcaccacctggcaacgtcccaggtacgcagggactattccaaccctcctctgcatgcagcttcttccatgtgccaccaccggatgtccctgcaaacgtgctcagtgatccttccatcatcttgggcatgcaaatgaacatgctcattgccgagcttgtcttggctgctcacaattcgccgcaagtcatgaacgtcatcactaagcatgtgctatggctcaacaagatcttgcttcaggttgcttcacccaatgatgatattttagcactcttgtttcgtacccaagcattcatgaagatggcaaagcaaccgcggtttgtggttccacggttgcagtaccacatgtacagtagtcttatcaatcgaatggtgcaagtagcccagaattatgaccaggagctcaagcaactcaagcttttcattgcacaaaatgagattttgggaagctatttgctagaacaaaataaggcttttgcagaaagggagaaggaaatgagtgcttttcactcgcaagtcgtgtcgatgaggacctctgagcttaggtctaccatagaatcgatgaatacgctgagtttgcaaatgcaaacagagagtgaggcgatgaacgaagcccaggagaacatggttgaagcaattcaagaatatgaaaggaaattacttgcaagagctctattttcagtgattgcggcaatagcaagtgttgctcttgcatttgccactggtggtgcaactgcaccaggggcagtggcagcagccggacgggctgtcactgcagcaggtaggttggcagaagggctccaaaaggttgtggacatcctacaaggcttgcaagcagtcatggaggttgtggtagccataagagacatcgtagaatcattggaaaacatgggtcaactagtagcagctcccgagatgccagagatgccaacagattcggactggttaatttttgtaaatgaggtggaggcagtggcagagcaagtgccaacagaagtggcagaggtcccagtgtggaaggctaagtgcaagaatgtggccgtgctaggtcaagcgatgtgcaccacagcagcatatattagtgagctacagtatgagataacggtggaagggatgctacaagagattgcacaacgtcaagcagacaggttagtggggatatcagcagcagatctattgagctacacagagatggcatcacaaatagacatgcgcacaacccgaatcctccttgagctcatcaagatgttgtacattcaaaatgcagcaattaagtatgagtacttgtatgatgctaatgagaagcttaattcatggccagtgagcatggagactgtatggaccatgctcatgcaacaagagagtgcagctctcttgggcttgctaaacttggggcccaccaatgatttcacagtaacccatgttgttaaagacatacctgtcaaggtgttagtagatggttatgattggaattttgagatcgcggtggaggattttgcaatctttccatcaggattgtctcgtgttcgcgtacgatatgttgagcttaaatttgaccaacaaggtactgatggtaggaacattgtcatccaccagcctagcactaacactggtttagtctacatgctcttacaaggctctcgtttcctccatgaccgcaaacgtgaggaggtgatggactatgaggcaagcatgggacctgtatatgcatatgcctatgacctcaacactggtgcaaccactctcaccaacatcccctcacaggaccatgccaacacatttatgcaaatgacaaccttcaatacttggagacttcgcctctctgcctctgctatggaaaatcagggattggtgtttcctacagccacttctcctgacagtactacccaaatttccatcacattctatgtcactgccattcgacgcatagattatcgacaagaggatgatgtggagtaa

SEQ ID NO: 953 - DNA, 2112 bp, Cyrtomium clivicola fortuni
atggagtatagcagcttgtattgtgatgtgaaccaagtgagcctgaggttccagaacactgagttctctgaggtcatggtggtgcatcggatgtatgtgcgcctggcccggcaagatatttggagccctcttctacacgttgcgtttaacccgaatgcaccacctggcaacgtcccaggtacgcagggactattccaaccctcctctgcatgcagcttcttccatgtgccaccaccggatgtccctgcaaacgtgctcagtgatccttccatcatcttgggcatgcaaatgaacatgctcattgccgagcttgtcttggctgctcacaattcgccgcaagtcatgaacgtcatcactaagcatgtgctatggctcaacaagatcttgcttcaggttgcttcacccaatgatgatattttagcactcttgtttcgtacccaagcattcatgaagatggcaaagcaaccgcggtttgtggttccacggttgcagtaccacatgtacagtagtcttatcaatcgaatggtgcaagtagcccagaattatgaccaggagctcaagcaactcaagcttttcattgcacaaaatgagattttgggaagctatttgctagaacaaaataaggcttttgcagaaagggagaaggaaatgagtgcttttcactcgcaagtcgtgtcgatgaggacctctgagcttaggtctgccatagaatcgatgaatacgctgagtttgcaaatgcaaacagagagtgaggcgatgaacgaagcccaggagaacatggttgaagcaattcaagaatatgaaaggaaattacttgcaagagctctattttcagtgattgcggcaatagcaagtgttgctcttgcatttgccactggtggtgcaactgcaccaggggcagtggcagcagccggacgggctgtcactgcagcaggtaggttggcagaagggctccaaaaggttgtggacatcctacaaggcttgcaagcagtcatggaggttgtggtagccataagagacatcgtagaatcattggaaaacatgggtcaactagtagcagctcccgagatgccagagatgccaacagattcggactggttaatttttgtaaatgaggtggagacagtggcagagcaagtgccaacagaagtggcagaggtcccagtgtggaaggctaagtgcaagaatgtggccgtgctaggtcaagcgatgtgcaccacagcagcatatattagtgagctacagtatgagataacggtggaagggatgctacaagagattgcacaacgtcaagcagacaggttagtggggatatcagcagcagatctattgagctacacagagatggcatcacaaatagacatgcgcacaacccgaatcctccttgagctcatcaagatgttgtacattcaaaatgcagcaattaagtatgagtacttgtatgatgctaatgagaagcttaattcatggccagtgagcatggagactgtatggaccatgctcatgcaacaagagagtgcagctctcttgggcttgctaaacttggggcccaccaatgatttcacagtaacccatgttgttaaagacatacctgtcaaggtgttagtagatggttatgattggaattttgagatcgcggtggaggattttgcaatctttccatcaggattgtctcgtgttcgcgtacgatatgttgagcttaaatttgaccaacaaggtactgatggtaggaacattgtcatccaccagcctagcactaacactggtttagtctacatgctcttacaaggctctcgtttcctccatgaccgcaaacgtgaggaggtgatggactatgaggcaagcatgggacctgtatatgcatatgcctatgacctcaacactggtgcaaccactctcaccaacatcccctcacaggaccatgccaacacatttatgcaaatgacaaccttcaatacttggagacttcgcctctctgcctctgctatggaaaatcagggattggtgtttcctacagccacttctcctgacagtactacccaaatttccatcacattctatgtcactgccattcgacgcatagattatcgacaagaggatgatgtggagtaa

SEQ ID NO: 954 - DNA, 2667 bp, Drynaria rigidula whitei
atgcacccgagaggccatgacggaatcaggatccccctgcagcaggcccgcggtgatgattatgcagaggagaggcagatgagaccgaggttcaaggccaatggtctggagctggactacgagaagatttacgcagggtcaaactcgatagcaagggaggtgggtctgaacaaggtaaaatgcggcgaggtgatggccatccaccggatgtttttccggctagacactttatcccaagagctgttgcgacaaccggagctggttcagcgtctcatcgtggttgctgatgtggtagagattgagggctctaatgccccactctcgctgcccgcctcttctcttgtgctcatcttttgccgcatcctcatcctcaaaagcaaggacgtggtcctcgaccttggcaattgggatttgagggttgctaccacttctccgcttcaccgctgctctatccgcgctcaacgagttgtcattgcttcgggctccatctctgcctctctgctcattcaggtgaaacataaactcgaatggagcgatggcactcatcttgatcagtgttttggtcgtccattctccttcactgcatctgaagtcaactcttctgctacaatcaccactaggactacctctgctatgcggtcaatcaacacctggccgggtacagcacccgtgtctaacttcattcaagtgaactctgaacagttcaatgtgcttgtaaatgcagtcccatggaagggtgtcgtcgactgccaagctgcattgccttcattagatgatctgctgcatcctgatgttattagtggcattcaatctaccctacttattgtagaaaccatccttaactttcagactgacaatccggccattattatcctagcacgacagcatgctgaatggattgtggacagcttacttcaggtggcgcatttgccaaactctacagttggtgtttctgaggtaaaaactcttttggcgcgtgcgcaaatgctcatgaagctgcccacggatggaagccagcatttaaaagttccattactggcttatggtgagtaccaagaagatattgagcggctgctcagaaatgcagaggcgtacgaccaagagtacagagcgcttacccgattcgtacagctagtcgagatcataggcagcgagttcctgcagctgagcaagtctctcgcccaaagggagagggacatagaagcattcgagtccttggttgtcattcgcaagcaaagcgagctggatcaggccattaggagaatgaactcattgatgacagaaattgagagacgaagttttgagatggccgacgccaaagccaggatggaagagggtttgcaggactacaacagaaggcagttgactagggcaatttttggaatcctaggagcgttactgcagctttgcgcatccctgaagttcggtggtggggcggacattgcggggggcattgcaacaacagttcccgcagcaatagacctgatacatgcggtgcaagatgcaagtgcaagtaccaagcttttggccatatcgcagacattaatggatttagagaagatagttgatgttgtaaatgcagtgaatgcgctagtggagagcgccacagagctggaggacatcatacatgctccggagttgcctctcatactaccttacacatgggatatcttggagaacgacattgaggagtttgcagctctcatgccctccgaggtgtcggaggtggtaacatggaaggccaagtgcaggaatttagtcgcagtgtgcagggaaatttgcattgctgccagctttgcctgcgaggtgcagtatgagctctttgtgcatgctaggcaacaagagatggcacgaaggcaagcagaacgcttggagggaatgcaaacagcagccgacttgagcagctacatagagctggccacacaggcggacatgcgcactacgcgccttctcctaagcctgctcaatgtactggctggccatcagggcgcactccactatcactacttgatggagttggaggtgttcacgtccagctggccttcagtcgacggcgtgaggatgcatctgctgcagctgaatcaaagggctcgtgcccgagagaacgcgttatttggcgatggagttcttactgtggatttgcagcacgactatgtgctggatgcgatacctgtgagcttgctcttgtcaggcgaggattggagcttcaccatcaatccggagcgaaatgcatcggctttcccgacaccgtgggattatgtgcgtattcggtacgtggagatgaagttcacgggagagcaccagccagtgagcaagacgggagagatttacctgttgctcagatcatctgccaacttccaagaccggttggaagagcaggtgctggagtatgaggccgctgttccgctcgtctaccaatacgcctacaacctctcaactggcgcaacgacactgcccaatctaccctcggagagcggcaaattctttcgcatgacgcccttcacgcgctggagactgcggctctctgcatctgcataccagaatgagggcgtgtccttccccacactccctgatcatccagactcagctgatagccccgtccaaattacaatcaccttttacgttactgccctgccacaaatacagtcacgctccctcgatgtataa

SEQ ID NO: 955 - DNA, 2667 bp, Drynaria rigidula whitei
atgcacccgagaggccatgacggaatcaggatccccctgcagcaggccggcggtgatgattatgcagaggagaggcagatgagaccgaggttcaaggccaatggtctggagctggactacgagaagatttacgcagggtcaaactcgatagcaagggaggtgggtctgaacaaggtaaaatgcggcgaggtgatggccatccaccggatgtttttccggctagacactttatcccaagagctgttgcgacaaccggagctggttcagcgtctcatcgtggttgctgatgtggtagagattgagggctctaatgccccactctcgctgcccgcctcttctcttgtgctcatcttttgccgcatcctcatcctcaaaagcaaggacgtggtcctcgaccttggcaattgggatttgagggttgctaccacttctccgcttcaccgctgctctatccgcgctcaacgagttgtcattgcttcgggctccatctctgcctctctgctcattcaggtgaaacataaactcgaatggagcgatggcactcatcttgatcagtgttttggtcgtccattctccttcactgcatctgaagtcaactcttctgctacaatcaccactaggactacctctgctatgcggtcaatcaacacctggccgggtacagcacccgtgtctaacttcattcaagtgaactctgaacagttcaatgtgcttgtaaatgcagtcccatggaagggtgtcgtcgactgccaagctgcattgccttcattagatgatctgctgcatcctgatgttattagtggcattcaatctaccctacttattgtagaaaccatccttaactttcagactgacaatccggccattattatcctagcacgacagcatgctgaatggattgtggacagcttacttcaggtggcgcatttgccaaactctacagttggtgtttctgaggtaaaaactcttttggcgcgtgcgcaaatgctcatgaagctgcccacggatggaagccagcatttaaaagttccattactggcttatggtgagtaccaagaagatattgagcggctgctcagaaatgcagaggcgtacgaccaagagtacagagcgcttacccgattcgtacagctagtcgagatcataggcagcgagttcctgcagctgagcaagtctctcgcccaaagggagagggacatagaagcattcgagtccttggttgtcattcgcaagcaaagcgagctggatcaggccattaggagaatgaactcattgatgacagaaattgagagacgaagttttgagatggccgacgccaaagccaggatggaagagggtttgcaggactacaacagaaggcagttgactagggcaatttttggaatcctaggagcgttactgcagctttgcgcatccctgaagttcggtggtggggcggacattgcggggggcattgcaacaacagttcccgcagcaatagacctgatacatgcggtgcaagatgcaagtgcaagtaccaagcttttggccatatcgcagacattaatggatttagagaagatagttgatgttgtaaatgcagtgaatgcgctagtggagagcgccacagagctggaggacatcatacatgctccggagttgcctctcatactaccttacacatgggatatcttggagaacgacattgaggagtttgcagctctcatgccctccgaggtgtcggaggtggtaacatggaaggccaagtgcaggaatttagtcgcagtgtgcagggaaatttgcattgctgccagctttgcctgcgaggtgcagtatgagctctttgtgcatgctaggcaacaagagatggcacgaaggcaagcagaacgcttggagggaatgcaaacagcagccgacttgagcagctacatagagctggccacacaggcggacatgcgcactacgcgccttctcctaagcctgctcaatgtactggctggccatcagggcgcactccactatcactacttgatggagttggaggtgttcacgtccagctggccttcagtcgacggcgtgaggatgcatctgctgcagctgaatcaaagggctcgtgcccgagagaacgcgttatttggcgatggagttcttactgtggatttgcagcacgactatgtgctggatgcgatacctgtgagcttgctcttgtcaggcgaggattggagcttcaccatcaatccggagcgaaatgcatcggctttcccgacaccgtgggattatgtgcgtattcggtacgtggagatgaagttcacgggagagcaccagccagtgagcaagacgggagagatttacctgttgctcagatcatctgccaacttccaagaccggttggaagagcaggtgctggagtatgaggccgctgttccgctcgtctaccaatacgcctacaacctctcaactggcgcaacgacactgcccaatctaccctcggagagcggcaaattctttcgcatgacgcccttcacgcgctggagactgcggctctctgcatctgcataccagaatgagggcgtgtccttccccacactccctgatcatccagactcagctgatagccccgtccaaattacaatcaccttttacgttactgccctgccacaaatacagtcacgctccctcgatgtataa

SEQ ID NO: 956 - DNA, 2667 bp, Drynaria rigidula whitei
atgcacccgagaggccatgacggaatcaggatccccctgcagcaggccggcggtgatgattatgcagaggagaggcagatgagaccgaggttcaaggccaatggtctggagctggactacgagaagatttacgcagggtcaaactcgatagcaagggaggtgggtctgaacaaggtaaaatgcggcgaggtgatggccatccaccggatgtttttccggctagacactttatcccaagagctgttgcgacaaccggagctggttcagcgtctcatcgtggttgctgatgtggtagagattgagggctctaatgccacactctcgctgcccgcctcttctcttgtgctcatcttttgccgcatcctcatcctcaaaagcaaggacgtggtcctcgaccttggcaattgggatttgagggttgctaccacttctccgcttcaccgctgctctatccgcgctcaacgagttgtcattgcttcgggctccatctctgcctctctgctcattcaggtgaaacataaactcgaatggagcgatggcactcatcttgatcagtgttttggtcgtccattctccttcattgcatctgagatcaactcttctgctacaatcaccactaggactacctctgctatgcggtcaatcaacacctggccgggtacagcacccgtgtctaacttcattcaagtgaactctgaacagttcaatgtgcttgtaaatgcagtcccatggaagggtgtcgtcgactgccaagctgctttgccttcattagatgatctgctgcatcctgatgttattagtggcattcaatctaccctacttattgtagaaaccatccttaactttcagactgacaatccggccattattatcctagcacgacagcatgctgaatggattgtggacagcttacttcaggtggtgcatttgccaaactctacagttggtgtttctgaggtaaaaactcttttggcgcgtgcgcaaatgctcatgaagctgcccacggacggaagccagcatttaagagttccattactggcttatggtgagtaccaagaagatattgagcggctgctcagaaatgcagaggcgtacgaccaagagtacagagcgcttacccgattcgtacagctagtcgagatcataggcagcgagttcctgcagctgagcaagtctctcgcccaaagggagagggacatagaagcattcgagtccttggttgtcattcgcaagcaaagcgagctggatcaggccattaggagaatgaactcattgatgacagaaattgagagacgaagttttgagatggccgacgccaaagccaggatggaagagggtttgcaggactacaacagaaggcaattgactagggcaatctttggaatcctaggagctttactgcagctttgcgcatccctgaagtttggtggtggggcggacattgcggggggcattgcaacaacagttcccgcagcaatagacctgatacatgcggtgcaagatgcaagtgcaagtaccaagcttttggccatatcgcagacattaatggatttagagaagatagttgatgttgtaaatgcagtgaatgcgctagtggagagcgccacagagctggaggacatcatacatgctccggagttgcctctcatactaccttatacatgggatatcttggagaacgacattgaggagtttgcagctctcatgccctccgaggtgtcggaggtggtaacatggaaggccaagtgcaggaatttagtcgcagtgtgcagggaaatttgcattgctgccagctttgcctgcgaggtgcagtatgagctctttgtgcatgctaggcaacaagagatggcacgaaggcaagcagaacgcttggagggaatgcaaacagcagccgacttgagcagctacatagagctggccacacaggcggacatgcgcactacgcgccttctcctaagcctgctcaatgtactggctggccatcagggcgcactccactatcactacttgatggagttggaggtgttcacgtccagctggccttcagttgacggcgtgaggatgcatctgctgcagctcaatcaaagggctcgtgcccgagagaacgcgttatttggcgatggagttcttactgtggatttgcagcacgactatgtgctgaatgccatacccgtgagcttgctcttgtcaggcgaggattggagcttcgccatcaatccggagcgaaatgcatcagcgtttccgacaccgtgggattatgtgcgtattcggtacgtggagataaagttcacgggagagcaccagccagtgagcaggacgggagagatttacctgttgctcagatcatctgcgaacttccaagaccggttggaagagcaggtgctggagtatgaggccgctgttccgctcgtctaccaatatgcctacaacctctcaaccggtgcaacgacactccccaatctaccctcggagagcggcaaattctttcgcatgacgcccttcacgcgctggagactgcggctctctgcatctgcataccagaatgagggcgtgtccttccccacactccctgatcatccagactcagctgatagccccgtccaaattacaataaccttttacgttactgcccttccacaaatacagtcacgctccctcgatgtataa

SEQ ID NO: 957 - DNA, 2664 bp, Cyrtomium clivicola fortuni
atggagtatagcagcttgtatggtgatgtgaaccaagtgagcctgaggttccagaacactgagttctctgaggtcatggtggtgcatcggatgtatgtgcgcctggaggagcttgacatgacgggggtggagggcatcgagaaggtgaaacgcctgtacgtgctggcggacgtggtggagctgccttccagagccaccacggtgtttgagtatgtgcgccttcccgctaccatttcagcgattatcctctgccgcgttctatatatccctgaagttcagaggctctccggctcatctttcgttgctcaatgctcgctcgacttcccgtttatgcgcctccatgtcgtcggaagaagcgagggtggtacgggtgttctgcaagccttttcctctgacgccaccgccagcaatattggcgtctacctccatgctgaccgcttcatctaccgccaggccacatctccggccagcgactttgtctttcccctggatgtaagggtcagctttggcagctctacctactccacaaccgccgttcccgactggcaaaaccttaatgtctccaacatccggtacgggccgcagcacctgtccaggggcccacccctcacatcctcagactctgacttgcacagatctgacgagatcgagctcctggcccggcaagatatttggagccctcttctacacgttgcgtttaacccgaatgcaccacctggcaatgtcccaggtacgcagggactattccaaccctcctctgcatgcagcttcttccatgtgccaccaccggatgtccctgcaaatgtgctcactgatccttccatcatcttgggcctgcaaatgaacatgctcattgccgagcttgtcttggctgctcacaattcgccgcaagtcatgaacgtcgtcactaagcatgtgctatggctcaacaagatcttgcttcaggttgcttcacccaatgatgatattttagcactcttgtttcgtatccaagcattcatgaagatggcaaagcaaccgcggtttgtggttccacggttgcagtaccacatgtacagtagtcttatcaatcgaatggtgcaagtagcccagaattatgaccaggagctcaagcaactcaagcttttcattgcacaaaatgagattttgggaagctatttgctagaacaaaataaggctttcgcagaaagggagaaggaaatgagtgcttttcactcgcaagtcgtgtcgatgaggagctctgagcttaggtctgccatagaatcgatgaacacgctgagtttgcaaatgcaaacagagagtgaggcgatgaacgaagcccaggagaacatggttgaagcaattcaagaatatgaaaggaaattacttgcaagagctctattttcagtgattgcggcaatagcaagtgttgctcttgcatttgccactggtggtgcaactgcaccaggggcagtggcagcagccggaggggctgtctctgcagcaggtaggttggcagaagggctccaaaaggttgtggacatcctacaaggcttgcaagcggtcatggaggttgtggtagccataagagacatcgtagaatcattggaaaacatgggtcaactagtagcagctcctgagatgccagagctgccaacagatgcggactggttaatttttgtaaatgaggtggaggcagtggcagagcaagtgccaacagaagtggcagaggtcccagtgtggaaggctaagtgcaagaatgtggccgtgctagggcaagcgatgtgcaccacagcagcatatattagtgagctacagtatgagataacggtggaagagatgctacaagaaattgcacaacgtcaagcagacaggttagtggggatatcagcagcagatcttttgagctacacagagatggcatcacaaatagacatgcgtacaacccgaatcctccttgagctcatcaagatgttgtacattcaaaatgcagcaattaagtacgagtacttgtatgatgctaatgagaagcttaattcatggccagtgagcatggagactgtatggaccatgctcttgcaacaagagaatgcagctctcttgggcttgctagacttggggcccaccaatgatttcgcagtaacctatgttgttaaagacatacctgtcaagttgttagtagatggttatgattggaattttgagatctcggtggaggattttgcaatctttccatcaggatggtctcgtgttcgcatacgatatgtcgagcttaaatttgaccaacaaggtactgatagcaggaacattgtcatccaccagccaagcactaacactggtttagtctacatgctcttacaaggctctcgtttcctccatgaccgcaaacgtgaggaggtgatggactatgaggcaagcatgggacctgtatatgcatatgcctatgacctcaacactggtgcaaccactctcaccaacatcccctcacagcaacatgccaacacatttatgcaaatgacaaccttcaatacttggagacttcgcctctctgcctctgctatggaaaatcagggattggtgtttcctacagccacttctcctgacaatactacccaaatttccatcacattctatgtcactgctattcgacgcatagatcatcgacaagaggatgatgtggagtaa

SEQ ID NO: 958 - protein, 886 aa, Aglaomorpha Roberts
MEYSSLYGDVNQVSLRFQNTEFSEVMVVHRMHVRLEELDMTGVEGIEKVKRLYVLADVVELPSVATQVFQYLRLPASISAIILCRVLYIPEVDQRAGMAQCSLDFPFMRLHVVASAHENGGGVMQAFSSDATPSNIGIYLHADRFIYRQATSPASNFVLPLEVRVSFGSSTLSGTTIRPDWQNLNVSNISYGPQHLSRGAPLTSSDSDLQRSDEIELLAEQDNWSPLLHVAFNPNAPPGNIPGTQGIFQPSSACSFFHVPPPNVPANVLTDPSIILGMQMNMLIAELVLAAHNSPQVMNVITKHVLWLNKILLQVASPNDDILALLFRIQAFMKMAKQPRFVVPRLQYHMYGSLINRMVQVAQNYDQEFKQLKLFIAQNEILGSYLLQQNRAFAEREREMSAFHSQVVSMRRSELQSAIETMDNLSLQMQSESEAMNEAQEDMVEAIQEYERKLLARALFSVIGAIASIALAFATGGATAPGAVAAAGGAVAAAGRLAEGLQRVVDILQGLQAVMEVVVAIRDIVESLKNMGQLVEAPEMPEMPTDADWLIFVNEVEAVAEQVPTEVAEVPVWKAKCKNVAVLGQAMCTTAAYISELQYQITVEEMLQEIAQRQADRLVGISAADLSSYTEMASQIDMRTTRILLELIKMLYIQNAAIKYEYLYDANEKLNSWPVSMETVWTMLLQQENAALLGLLDLGPTNDFTVTYAVKDIPTKLLVDGFDWNFEIAVEDFAIFPSGWSRVRIRYVELKFDQQGADSSNIVIHQPSTNTGLVYMLLQGSRFVHDRKREEVMDYEASMGPVYAYAYDLNTGATTLNNIPSQQYANTFMQMTPFNAWRLRLSASAMENQGLVFPTATSPDNTTQISITFYVTAIRRIDHRQEGDVE

SEQ ID NO: 959 - protein, 887 aa, Humata termanii
MEYSSLYGDLNQVSLRFQNTELSEVMVVHRMHVRLEELDMTGVEGIEKVKRLYVLADVVELPPIATTTFEYLRIPATTSAIILCRVLYIPQVDQRNPHLDAQCSLDFPFMRLHVVGSAHPNGGGVMQAFSSDATASDIGIYLHADRFIYRQATSPASNFVLPLDVRLNFGSSTFSSDVRPDWQNLNVSNISYGPQHLSRGTPLTSSESDLQRTDEIELLALPDVWSPLLHVAFSPNAPPGNIPGTQGQFQPSSACSFFHVPPPDVPAKVLTDPSIILGIQMNMLIAELVVAAHNSPQVMNAITKHVLWLNKILLQVASPNDDILALLFRIQAFMKMAKEPRFVVPRLQYHMYGSLINRMVQVAQNYDQEFKQLKLFIAQNEILGRYLLQQNRAFAEREREMSAFHSQVVSMRRSELRSAIESMDTLSLQMEAESEAMNEAQESMVEAIQEYERRLLARALFSVIAAIASVALAFATGGATAPGAVAAAGGAVSAAGRLAEGLQRVVDILQGLQAVMEVVVAIRDIVDSLQNMGQLVDAPEMPEMPTDADWLIFVNEVEAVAEQIPTEVAEVPVWKAKCKNVAVLGQAMCTTAAYISELQYQITVEEMLQAIAQRQADRLVGISAADLSSYTEMASQMDMRTTRILLELIKMLYIQNAAIKYEYLYPANERLDSWPVSMETVWTILLQQESAALLGLLDLGPSNDFTVTYAVKDIPTKLLVDGFDWNFEIAVEDFAIFPSGLSRVRIRYVELKFDQQGADSSNIVIHQPSTNTGLVYLLLQGSRFIHDRKREEVMDYEASIGAVYAYAYDLNTGATTLPNIPSQDQANTFMQMTPFNGWRLRLSASAMENQGLVFPTATSPDNTTQITITFYVTAIRRIDHRQEGDVE

SEQ ID NO: 960 - protein, 876 aa, Pellaea rotundifolia
MEYGSLYGDVNQVSLRFEKTEVSEVMVVHRMHVRLEELDMSSDKLKRLYVLADVVELPSQRQTIVIPATVSAIIMCRVLYIPYIWTVVDNCTLVLPHMRFRVVETSNIAPRTGQFFALPPSDAAVDNDVGSFGGLYIHADRFIYRQATSFTSDWVQPLGLRVRGSSTFSSTFRPDWPETLPVNNLNQTITLSLGSFLTPSDSDLQRSDEIEFLQTEPQRVQVVVDRGPGSQTGLVLLVENSPEISVFPAPSLEHVPADVLADPSIILGMQMNMLSAELVLAAHNSQQVIKAVSKHVEWLNKILLQVASPSDDILALLFRVQAFIKMAKQSRFVVPRLQYHAYSNLINRMVQVAQVYDQELRQLRLFIAQNEILGSYLLQQNKAFAEKEKDMSAFHSQVVSMRRSELSSTIEMMGRLSSQMETESEAMDEASDSMVAAIQEYERKQLARALFAVLGAIASVALAFATGGATAPGAVASAGAAVTAAGRLAEGLRRVVEILEGLQAVMEVVAAIRDLVESLENMGQLVEAPEMPEMPTNADWLIFVNEVEAVAEQVPEEVSEVPVWKAKCKNVAVLGQEMCTTAAHISELQYQIRVEEMLQEIAQRQADRLMGISAADLSSYTEMATQIDMRTTRMLLQLIKMLYIQNAAIKYEYLYPASERLNSWPVTMPTVWTMLLQQENAALLGLLDLGPSNDFTVTHVVKDIPVKLLVDGYDWHFEIPVEDSAIFPAGWSRVRIRYVELKFDKQGTDSNIVIHQPSTNTGEIYMLLQSSRFLSDRKREEVMDYEASTGLAYAYAYDLSTGATTLTNIPSEAHANTFMQMAPFTAWRLRLSASAMENQGLVFPTATSPDNTTQISITFYVTAIRRIDTRRQRADA

SEQ ID NO: 961 - protein, 893 aa, Adiantum hispidulum
MEYSSLYGDVNQVSLRFEKTEVSEVMVVHRMHVRLEELDMSSDKLKRLYVLADVVELPSQRSTIVVPATVSAIIICRVLYIPYIFTVLENCSFFLSLMRFRVVETRIEPPRTGQFFALPSADAVDDGVGGFRGLYILADRFIYRQATSFTSDWVQPLSLRVQGSSTFSSTFRPEWPETLPVTNLNHTVTLSLGSFLTPSDSDLQRSDEIEFLPTEPQRVQVVINRGPGSQTGLVLIPENSPEISVFPAPSLEHVPADVLADPSIILGMQMNMLSAELVLAAHNSQQVIKAVTKHVEWLNKILLQVASPSDDILALLFRAQAFIKMAKQSRFVVPRLQYHVYRNLINRMVQVAQDYDQELRQLRLFIAQNEILGSYLLQQNKAFAEKEKDMSDFHLQVVSMRRSELSSTIEMMGRLSLQMETESEAMSEAQESMVEAIQEYERKQLARALFAVIGAIASVALAFATAGATAPGAVAAAGAAVTAAGRLAAGLQKVVEILEGLQKVMEVVAAIRDLVESLENMGQLLEAPEMPEMPTNADWLIFVNEVELVAEQVPEEVSEVPVWKAKCKNVAVLGQEMCTTATHISELQYQIRVEEMLQEIAQRQADRLMGISAADLSSYTEMATQIDMRSTRMLLQLVKVLYIQNAAIKFEYLYPASERLNSWPVTMPTVWTMLLQQENAAILGLLDLGPSNNFTVTHVVKDIPVKLLVDGYDWHFEIPVEDSATFPAGWSRVRIRYVELKFDKQGTDSNIAIHQPSTNSGLIYMLLQSSRFLSDRRREEVMDYEASMGLAYAYAYDLSTGATTLTNIPSEAHVNTFMQMTPFTAWRLRLSASAMENQGLVFPTATSPDNTTQISITFYVTAIRRIETRRQQADAEGGEGDRLEGGVGFGQPS

SEQ ID NO: 962 - protein, 852 aa, Adiantum polyphyllum Amaretto
MDYSTLYTDLNQISMPLDRVEFSEVMVIHRMYLRLSDLNVGELPGAESVKRLYVFADVVELATFAYPQLLHTRMPGSVTVIILCRLLQFPTDGSFSAWLELPFMELHTLIEQHKSEIKAADDAKWGTYVHAEEVQLSPLFNGWPYLVVEAQRCIITAAMHNTFNRPGWVRSVTQFTTDQSGRVDTTLLARTEFGHIYLPLETDSPTAFSVSHRQSTNLPVEYTGIPVEVVTDPNILMGMQTSVHIAELVKACYPSPELVSAVGVHVNWLNEVLLRVVQNESQLQGTEAYNECLALLGRIQCVMKMGPFVSVVPQLQYRMYGSLIRQMAQVAQNYDQDFRQLKLFIAQNQILGSYLLQQNKAFADREVQMEGFHSAVISQRRQELDDAIAKMDRLSLQMEEEDRAMEQARKEMEEGLKQFQNEQVARAVFAVLKSVAMIALAFVTAGATAPGAAASAAQAVSIAGQAAQALQRVVEILEGLEAVMEVVAAIKDLVDALDQVSQIVDAPPMPDMPSEADWSIFVNEIEAVAEGMPTEVSEVPAWKAKCKNVAALGREMCITAEQISQLQYDIWVQGLLRDIAQSHADRLAAIQPANLTNYLEMATQMDMRTTRILIGLLNIMRIQNAALMYEYLLTPTQLTAWPLRMDTVANLLITQESAALSGLAQLGPPSDFTSRHVVKGIPVSLLLDSGDWEFEIPVQGGMSSFPSSWTRVRIRHLEMHFVQEASGGGEIIHQPATQTGTVYILLQGSTVFHDRRREEVMTFQAAVPLNYHYAYRLDTGEATLTNEPSEQFANTFMQMTPFTHWRLRLSASAAENEGLAFPTATAPDSTTEIAITFHVTAIRQIDWRQEEE

SEQ ID NO: 963 - protein, 857 aa, Adiantum polyphyllum Amaretto
MATVDYSTLYRDLNQISMPLDRVEFSEVMVIHRMYLRLSDLNVGELPGAERVKRLYVLADVVELATFAHPQLLNTRMPGSVTVIILCRLLQFPTDGSFAAWLELPFMELHTLIEQYRSEIKAADDAKWGTYVHAEEVQLSPLFNGWPYLVVEAQRCIITAAMHNTFNRPGWVRSITQFTTDQSGRVDTTLLARTEFGHIDLPLETDSPTAFSVSHRQSTNLPVEYTGIPVEVVTDPNILMGMQTSVHIAELVKACYPSPELVSAVGVHVNWLNEVLLRVVQKESQLQGTEAYNECLALLGRIQCVMKMGPFVSVVPQLQYRMYGSLIRQMAQVAQNYDQDFRQLKLFIAQNQILGSYLLQQNKAFADREVQMESFHSAVISQRRQELDDAIAKMDRLSLQMEEEDRAMEQARKEMEEGLKQFQNEQVARAVFAVLKSVAMIALAFVTAGATAPGAAASAAQAVNIAGQAAQALRRVVEILEGLEAVMEVVAAIKHLVDALDQVSQIVDAPPMPDMPSEADWSIFVNEIEAVAEGMPTEVSEVPAWKAKCKNVAALGREMCITAEQISQLQYDIWVQGLLRDIAQSHADRLAAIQPANLTNYLEMAIQMDMRTTRILIGLLNIMRIQNAALMYEYLLTPTQLTAWPLRMDTVANLLITHESAALSGLAQLGPPSDFTSRHVVKGIPVSLLLDGGDWEFEIPVQGGMSSFPSSWTRVRIRHLEMHFVQEASGGGEIIHQPATQTGTVYILLQGSTVFHDRRREEVMTFQAAVPLNYHYAYRLDTGEATLTNEPSEQFANTFMQMTPFTHWRLRLSASAAENKGLAFPTATAPDSTTEIAITFHVTAIRQIDWRQEEEEE

SEQ ID NO: 964 - protein, 858 aa, Adiantum polyphyllum Amaretto
MATVDYSTLYRDLNQISMPLDRVEFSEVMVIHRMYLRLSDLNVGELPGAERVKRLYVLADVVELATFAHPQLLNTRMPGSVTVIILCRLLQFPTDGSFAAWLELPFMELHTLIEQYRSEIKAADDAKWGTYVHAEEVQLSPLFNGWPYLVVEAQRCIITAAMHNTFNRPGWVRSITQFTTDQSGRVDTTLLARTEFGHIDLPLETDSPTAFSVSHRQSTNLPVEYTGIPVEVVTDPNILMGMQTSVHIAELVKACYPSPELVSAVGVHVNWLNEVLLRVVQKESQLQGTEAYNECLALLGRIQCVMKMGPFVSVVPQLQYRMYGSLIRQMAQVAQNYDQDFRQLKLFIAQNQILGSYLLQQNKAFADREVQMESFHSAVISQRRQELDDAIAKMDRLSLQMEEEDRAMEQARKEMEEGLKQFQNEQVARAVFAVLKSVAMIALAFVTAGATAPGAAASAAQAVNIAGQAAQALRRVVEILEGLEAVMEVVAAIKHLVDALDQVSQIVDAPPMPDMPSEADWSIFVNEIEAVAEGMPTEVSEVPAWKAKCKNVAALGREMCITAEQISQLQYDIWVQGLLRDIAQSHADRLAAIQPANLTNYLEMAIQMDMRTTRILIGLLNIMRIQNAALMYEYLLTPTQLTAWPLRMDTVANLLITQESAALSGLAQLGPPSDFTSRHVVKGIPVSLLLDGGDWEFEIPVQGGMSSFPSSWTRVRIRHLEMHFVQEASGGGEIIHQPATQTGTVYILLQGSTVFHDRRREEVMTFQAAVPLNYHYAYRLDTGEATLTNEPSEQFANTFMQMTPFTHWRLRLSASAAENKGLAFPTATAPDSTTEIAITFHVTAIRQIDWRQGEEEEE

SEQ ID NO: 965 - protein, 860 aa, Adiantum polyphyllum Amaretto
MATVDYSLLYRDLNQISMAVDKVEFSEVMAIHRMYVNLADLDVGELVGAETVKRLYVFADVVELAPRQLPPGDQTRMPGSVTVIILCRLLHFPTGELPVPAFLHLSFMKLHAIQREHDMSEIAAADGMNWGVYIYGEEVQLTGPFSGYLLSVRTDRAIITSAIHNLIEQPGRVTSSINITWGQFEPNTTSMLATPAGWPSGQFFHLWGVSPSAFLVLPSISTNVSFTSIPVEVVTDPNILLGMQTTVQIAELVKAGHPSPDIVSAVAKHAIWLNKLLLQVVQNETHLRGTESYNECLALLGRAQFVIKMGRYGLVVPQLQYKMYGSLIKQMAQVAQNYDQDFKRFKLFIIQNQILGSYLLEQNKAFADRELQMEGFHSAVISQRKGELNTAFEKMDRLSLQMEDENAAMEQAQKDMEEGLRQFQNRQVARALFAVLKAVALIGLAFVTAGATAPGAVASAGQAVSIAGQAAQGLRRVVEILEQLEAVMEVVAAVKDLVNSLEQVGQLVQAPEMPDMPSEADWSIFVNEIELVAEGMPTEVSEVPAWKAKCKNVAALGREMSITAVQISELQYDIWVQGMMRDIAQSQADRLAAIRPVDLTNFLEMATQMDMRTTRMVLGLVNMLRIQNAALMYEYLLTPTELRAWPLGMDTVSNLLIAQENAALLGLTQLGPSSDFTSTHVVKGIPVSLLLDGEDWEFEIPVQADMSSFPSSWTRVRIRHLEMHFVAQEMNGASGGEIIHQPATQTGTVYILLEGSTTFHDRRRDEVMTFQAAAPLSYQYAYRLDTGETTLSNQPSEHFANTFMQMTPFTRWRLRLSASAFENAGLAFPTATALDSTTQIAITFYVTAIRQIDRRHELEE

SEQ ID NO: 966 - protein, 850 aa, Asplenium nidus var plicatum; identical to SEQ ID NO: 803

SEQ ID NO: 967 - protein, 850 aa, Asplenium nidus var plicatum
MASFPDYREIYKNVNQVTRAVASRQGSEVMSIHRMYFKLDELEVERLTEADTVKELVVFADVVGIEGQQVKLPASRTVTIVCHILHVKQEAVKLRFDSFGPVDCDRGWLPGIGEAALILSNSPQVRLSIYAQQVVCNTTRAVVQVAHPVTVSQTVSPHNPSRYAIPGTMKWQVEIASDQPDLSAAERSYELRTERFWDVMEKVWRIDQQEWSLFTHLLQGPVSIPPAILGDSNIILGMQSTLLIAELVLSYQTRADDTVSAANAHLQWLITNLLQVLDDNSLDKETREQLLALQARAELASKLPLDGSHTLIVPRLEYGQYQGLIKSMAAVAEAYNSEFMAVNLFIQQNEILGSYLLQQNKAFAARERDMDTFHGLALARKQQELRTAQESMEDLNAQLTQQTEAMDQAKRDMDAGFKKYRDEQVAKAFFSVLKGVLAIGAAIFTGGAAAGPAVNAGVDAVKGVSSLAGKLDMVIDIMERMEKVMEVLNAVNDLVTALSEINKMVEAPEMPSVPSTYEWDIFENEMEEVAESMPTEVTEARTWKTKCKNVAAVCRAICNTASYIGQLQYDVFVQSNQALIAGKQAERLEAIQPADLTNFLEMATQMDMRTSRMLLNLLKVMTIQNAALLFHFLLPPVPFTGWVTVDMVRNALVKHEADALAARERLGPSTDFVQTYVMSDIPISLLLDGDDWIFTIDPADGSTFPLSWSRVRIQYLEMKFTGGEEFHKPTTSSGRVYILLQASRNFQDRLHGDVLHFEAAVPLRYQYAYDLQSGETTVSNRPSQQHDGEYMQMTPFGQWRLRLSASAVENQGLAFPTAVATDLDSSTTQISITFHLTAVRRIDTRALVEL

SEQ ID NO: 968 - protein, 877 aa, Adiantum raddianum Gracillimum; identical to SEQ ID NO: 798

SEQ ID NO: 969 - protein, 881 aa, Campyloneurum angustifolium
MAVATLRAAEYRELYKDLNQVSEGLILEMMEFSEVMVIHRMYLRMVELDVGHLEGAEKVKHLYVFADVVEMAPASSTVRLPGSVSVSIVCRVLWLPVPVSNIPLIAFPHLKLRANFASGSGNRQFNVYRRTDGGSEVDEGLALCIHAVDIQLTGVPAFAVNSPAFYLFTDPRNLTMPAEGAITFGDPDRQVPVLMFRMYAEAQRLSGVNTGIIRISPPFSNNLRIATTVHAPPTVTLLTIDTHHPHGPGFWILRGIPDSLLKSDQLMLLMQMSLLIAELAELAHPSSETRAAVLEHVEWLSGVLIDGASSTEGTQMHQEYLELLFRAQYLLKTTSSSRSLVVPQLQYALYSPLINRMAQVAQIYDDAVNQFKLFIAQNRILGSYLLEQNKASAERERDLEVFHAELISQMTIELNSTLLKMDQLSLQMEAQTADMEQAEREMEEGLRRFRNRQVARAIFSVFRAIAAVALTVVTGGAAAPAAMNAARGAVSVAGQAARGLQSVLEILEGLQVVMEVVAIIKELVESLQDLGKLVEAPDMPEMPTDADWAIFVNEVEAVAAEMPEEVSEVVTWKTKCKNVAAVGRELMTTAAYISRLQYDIKEHSMLQEIAKRHANRLANTQAANLSSYTEMVIQMEMRTMRIIISLVKVVYVQNAALMYQYLSQPTQMRQTWPVSMETVWRMLTQREHASVLGLIRLGPSFDFERIYVVRDIPVSLLLTGEDWEFEIPVSDETTFPSSWTRVRIKHLEMKFVHDDGSAAAGHHQPITDTGKVYILLQSSRVFHDRDQAGREPLSYEAALPLDYQYAYHLDTGETTLSNLPTTQFINTMTPFTNWRLRLSASALENQGLDFPTARQQGAVNQDATTQIAITFHVSAIRQISF

SEQ ID NO: 970 - protein, 882 aa, Campyloneurum angustifolium
MAVATLRAAEYRELYKDLNQVSEGLILEMMEFSEVMVIHRMYLRMVELDVGHLEGAEKVKHLYVFADVVEMAPASSTVRLPGSVSVSIVCRLLWVPAQVSDIPLIAFPHLKLRVILPRGPVGVVFNQFAVFRRTDGGSEVDEGLALCIHAADIQLTGVPASAVNSAAFYLFTDPHNLTMTAEGAITYGDLDRQVPVLMFRMYAEALSLSGVNTGIIRIPPPFINNLRVATTVHAPPTLLTLDSYMPIPPGFWILRGIPDSLLKSDQLMLLMQMSLLIAELAELAHPSSETRAAVLEHVEWLSGVLIDGASSTEGTQMHQEYLELLFRAQYLLKTASSSRSLVVPQLQYALYSPLINRMAQVAQIYDDAVNQFKLFISQNRILGSYLLEQNKASAERERDLEVFHAELISQMTIELNSTLLKMDQLSLQMEAQTADMEQAEREMEEGLRRFRNRQVARAMFSVFRAIAAVALTVVTGGAAAPAAMNAARGAVSVAGQAARGLQSVLEILEGLQVVMEVVAIIKELVESLQDLGKLVEAPDMPEMPTDADWAIFVNEVEAVAAEMPEEVSEVVTWKTKCKNVAAVGRELMTTAAYISRLQYDIKEHSMLQEIAKRHANRLANTQAANLSSYTEMVIQMEMRTMRIIISLVKVVYVQNAALMYQYLSQPTQMRQTWPVSMETVWRMLTQREHASVLGLIRLGPSFDFERIYVVRDIPVSLLLTGEDWEFEIPVSDETTFPSSWTRVRIKHLEMKFVHDDGSAAAGHHQPITDTGKVYILLQSSRVFHDRDQAGREPLSYEAALPLDYQYAYHLDTGETTLSNLPTTQFINTMTPFTNWRLRLSASALENQGLDFPTARQQGAVNQDATTQIAITFHVSAIRQISF

SEQ ID NO: 971 - protein, 885 aa, Campyloneurum angustifolium
MAVATLRAAEYRELYKDLNQVSEGLILEMMEFSEVMVIHRMYLRMVELDVGHLEGAEKVKHLYVFADVVEMAPASSTVRLPGSVSVSIVCRLLWVPAQVSDIPLIAFPHLKLRVILPRGPVGVVFNQFAVFRRTDGGSEVDEGLALCIHAADIQLTGVPASAVNSAAFYLFTDPHNLTMTAEGAITYGDLDRQVPVLMFRMYAEALSLSGVNTGIIRIPPPFINNLRVATTVHAPPTLLTLDSYMPIPPGFWILRGIPDSLLKSDQLMLLMQMSLLIAELAELAHPSSETRAAVLEHVEWLSGVLIDGASSTEGTQMHQEYLELLFRAQYLLKTASSSRSLVVPQLQYALYSPLINRMAQVAQIYDDAVNQFKLFISQNRILGSYLLEQNKASAERERDLEVFHAELISQMTIELNSTLLKMDQLSLQMEAQTADMEQAEREMEEGLRRFRNRQVARVMFSVFRAIAAVALTVVTGGAAAPAAMNAARGAVSVAGQAARGLQSVLEILEGLQVVMEVVAIIKELVESLQDLGKLVEAPDMPEMPTDADWAIFVNEVEAVAAEMPEEVSEVVTWKTKCKNVAAVGRELMTTAAYISRLQYDIKEHSMLQEIAKRHANRLANTQAANLSSYTEMVIQMEMRTMRIIISLVKVVYVQNAALMYQYLSQPTQMRQTWPVSMETVWRMLTQREHASVLGLIRLGPSFDFERIYVVRDIPVSLLLTGEDWEFEIPVAEETTFPSSWTRVRIKHLEMKFVHDDGSGAAGHHQPITDTGKVYILLQSSRVFHDRDQAGREPLSYEAALPLDYQYAYHLDTGETTLSNLPTTQFINTYMTMTPFTNWRLRLSASALENQGLDFPTARQEGAVNQDATTQIAITFHVSAIRQISF

SEQ ID NO: 972 - protein, 845 aa, Blechnum cartilagineum Sw; identical to SEQ ID NO: 813

SEQ ID NO: 973 - protein, 845 aa, Blechnum cartilagineum Sw
MGNASSTDYEHIYRNANNISRMVATPVCSEVMSVARMFVRLRDLDASRLKNPEVVKELYVVADVVDMEEYNDLTLPGSERIYLICRVFTWRRNQPPPTTVRIRTPWLNLSSCSKLEICPLRHDRQAQTSPAFQCFARAKHSTTSEIAPAVLFLHAAHIYTSNPDTDTSHLNVVLQAQESAQYTLMSADQTPSGEEIFWEVETYPLLPRSDLNSTILSAQEANVLVIELILSYITHATETVKQASLHLEWLNKLLNYALNDTSSASTGSLDDEALDRQLHNLSFQVQFLLNQPPTGAGLIVPRLQYYAYSNLVGTMARIAENYDKEFRQFSLFIEQNDVLGTYLLQQNKAFAEKEREMEVFHLELQQVKKDDLTRALAKLERLEVDMREMNAAMEQAERDMEADLVQYRNRQVARAVFSVIGAIAQLGLAFFTGGATAGGAVAGVANAVSQVTDSAALASLRRISETLEKLVLVTEFLVAMRDLLNAVMDIHQGPPEVPTLPEMVSEAEWAIFENEIEAVAAGMPAEVSSVLTWKTKCKNVAALGREMITLATIIVDLQHDIKVHGLMREMAQNHAQRLKALQPVDLKNYQEMATELDMRTTRMLLGLLEVLSLQNAALRYQYLLPPSPVTIESTSLTMSTAWTLLLQHESASVISLADLGFATDQEVAYIVKGIPVGLLLDGEDWDFPISVRDIAEGAAFPADWSRVRISHVEMKFVKPGAAPVDEEETVHQPTTNTGKVHMLLRGEQLFADRKRGESLKYEAAVSMEYQYAYRLDTGETTQSNRPSQEFGDKLFMQMTPFTRWKLRLPTAANENRGLAFPTASAENATTQITISFHVSAIRTIF

SEQ ID NO: 974 - protein, 817 aa, Blechnum cartilagineum Sw; identical to SEQ ID NO: 815

SEQ ID NO: 975 - protein, 851 aa, Adiantum pedatum; identical to SEQ ID NO: 793

SEQ ID NO: 976 - protein, 371 aa, Adiantum pedatum
MDVDYAAIYKDVNQVTRTVATSQCSEVMAIQRLYVRLNDLDVKGLRNVEVVKQVVVFADVVEVEGGDVLELPGSTQITIVCRVLHTKHPSGAVIRLSSLAPVKCRGREHRHASGPRTHSVTPMNGQLASDGQIVTILATEVVAPAGASLQVQCPVLVDATIYDSDGYHPDFFYDLNGTASWSSLPFGGATGTTAATARSFQTTTVAPLSWITWTMNEVDWQPSFRVVLPETLPPRLLVNSSILLAMETNILASELISEFQREAVQTTAAVHQHTIWLDDQFQLAVRSSQRQDQLQSQQSRNLHFRVQSLLKLDRMDSNAPLVVPPLQYEQYDKLINLMTQAAQSYDNDFKNLNLFMQQNEVSNSIGIDRLP

SEQ ID NO: 977 - protein, 874 aa, Pteris cretica Roweri; identical to SEQ ID NO: 841

SEQ ID NO: 978 - protein, 906 aa, Pteris cretica Roweri
  misc_feature (464)..(465): Xaa can be any naturally occurring amino acid
  misc_feature (474)..(474): Xaa can be any naturally occurring amino acid
  misc_feature (484)..(484): Xaa can be any naturally occurring amino acid
  misc_feature (572)..(572): Xaa can be any naturally occurring amino acid
  misc_feature (574)..(574): Xaa can be any naturally occurring amino acid
  misc_feature (627)..(627): Xaa can be any naturally occurring amino acid
  misc_feature (630)..(630): Xaa can be any naturally occurring amino acid
  misc_feature (650)..(650): Xaa can be any naturally occurring amino acid
  misc_feature (657)..(657): Xaa can be any naturally occurring amino acid
  misc_feature (706)..(706): Xaa can be any naturally occurring amino acid
  misc_feature (745)..(745): Xaa can be any naturally occurring amino acid
  misc_feature (768)..(768): Xaa can be any naturally occurring amino acid
  misc_feature (777)..(777): Xaa can be any naturally occurring amino acid
  misc_feature (786)..(786): Xaa can be any naturally occurring amino acid
  misc_feature (788)..(788): Xaa can be any naturally occurring amino acid
  misc_feature (790)..(790): Xaa can be any naturally occurring amino acid
  misc_feature (808)..(808): Xaa can be any naturally occurring amino acid
  misc_feature (818)..(818): Xaa can be any naturally occurring amino acid
  misc_feature (834)..(834): Xaa can be any naturally occurring amino acid
  misc_feature (843)..(843): Xaa can be any naturally occurring amino acid
  misc_feature (869)..(869): Xaa can be any naturally occurring amino acid
  misc_feature (873)..(873): Xaa can be any naturally occurring amino acid
  misc_feature (878)..(879): Xaa can be any naturally occurring amino acid
MFTQDDDWCVYMYCSPGILDMAGRDHNTDVINYEEIYKAVDEVRRTVVPRSKDAVMIVEGMYVNLNSRIDDGLFTGDSSKPKEVWVVADVVALSNDVKVPTSTERLVILCRILHVDGSYARLFSASQNVILDCDYIQESEAISKSWKVRSTELQIHIYAQCLQAPSSKELMPLCVSIPAHRKYPFFIYVMWGLFGMFDSGRGRMMPALSFPRHENNFLGPLFRSREELEQLERLFVVSLCDEQIPAALLSEAAIVEAMQATLLKAELILTYQTQAHGGATAEMARQHVEWLRSQLKGCISSQQEGQVQLDAGLAALLVRAESLSKMPQRTAYNVVPSLTYKAYRDLINRLATAAKDYDNSFMQMRTLVQSSQMTDSDFETLYKALAQKEKDVDEYHQQLARLKQNELKEVSSSLDVLKCELEKQKQAMDEAEQDANDSNKHIAEYAPLLALNKLISYLQEIKFXXTYCRTERIXDEASCQSCVXSGEGCVCHGGSGVYCGHNCRSSSGGCGGSSERQWKNETSLGATRKDQQVTESHGCHPEAHRLSKSSQGRDRGTGVAKHAHGGRLGHIXEXDYGRGKPARESHQCGQLGSQVQECSSGGQGVHQDRKSHGAAAIRNTGAKFARXGGXEAQGASGGDHLQGQRLRQVXGDSKARXDAAEQFAHQVTTYPGSPACGCVLSFPAGPNTVHRVGGRGHGDSNTDRQXGRHTDEPGQSEQVQRQNNHLQCGGHTSKSVGERRRLGLXHRGPGIRSERSQGLQRLEPCAHXVHDHQVCCXFRQAANSRXRXHXRRHGSVLDASSDRFPRPXEGRQESATVXGGGAIALPIRLQLQHXGGAGRQPPXHQRWGGGFLDAHDALHYMAPLSSYLXSLQXRPQIXXLFCLHNHVHTHRLPCQRHSRRVLSFQM

SEQ ID NO: 979 - protein, 849 aa, Dryopteris marginalis
MAVMDYSEIYRDLNQISMGVDRVEFSEVMVIHRMYVRLADLDVGELAGAESVKRVYVFADVVELAPGTRMQMPGSVTVIILCRLLQFPTDGSQAATLQLPFMKLHALLRERHTSEITAADGMNWGTYIHGEEVQVIIPWSTVNSILRVWADGSSMTSSFHNVFDEPGRIVSTTVFTRPGAPDNTTLSADPGMSILNSFLLHTVSPSAFSVLARQSSNISFTNIPVDVVTDPNILLGIQTNVLIAELVQVCHPSPEIFAAVAEHLNWLNKIMLQVVKNETQLQGTESYNECLALLGRIQSVIKIARLGLVVPQLQYRMYSSLINQMAQVAQNYDREFKQFKLFIIQNQILGSYLLQQNRVFADREQQMESFHSVVISQRKEELDSATTKIERLSLQMEAENDAMEQAKKEMDEGLRKYQNEQVARAVFSVLSAIAQIGLAFITGGATAPGAVASAAQAVSIAGQAARALEKVVKILEQLEAVMEVVTAVKELVDSLEQIGHIVEAPVMPEMPSEADWSIFVNEIEAVAEQMPTEVAEVPAWKAKCKNVAALGREMSITAAHISQLQYDIWVQGMLREIAQSQADKLAAIQPVDLTNYLEMVTQMDMRTSRMLLGLINILRIQNAALMYEYLLTPTQLTAWPLAMDTVGTLLIQQESSALIGLAQLGPPSDYTSTHVVKDIPVSLLLDGDDWEFEIPVQDGTTFPSSWSRVRIRHLEMHFVQAGGDEQPQIIHQPATQTGSVYILLQGSTIFHDRRRDEVMTFEAAVPLNYHYGYRLDTGETTVTNVPSEHFANTFMQMTPFTRWRLRLSASAAENAGLAFPTATAPDSTTQIVITFHVSAIRQIDWRHDE

SEQ ID NO: 980 - protein, 849 aa, Dryopteris marginalis
MAVMDYSEIYRDLNQISMGVDRVEFSEVMVIHRMYVRLADLDVGELAGAESVKRVYVFADVVELAPGTRMQMPGSVTVIILCRLLQFPTDGSQAATLQLPFMKLHALLRERHTSEITAADGMNWGTYIHGEEVQVIIPWSTVNSILRVWADGSSMTSSFHNVFDEPGRIVSTTVFTRPGAPDNTTLSAEPGMSILNSFLLHTVSPSAFSVLARQSSNISFTNIPVDVVTDPNILLGIQTNVLIAELVQVCHPSPEIFAAVAEHLNWLNKIMLQVVKNETQLQGTESYNECLALLGRIQSVIKIARLGLVVPQLQYRMYSSLINQMAQVAQNYDREFKQFKLFIIQNQILGSYLLQQNRVFADREQQMESFHSVVISQRKEELDSATTKIERLSLQMEAENDAMEQAKKEMDEGLRKYQNEQVARAVFSVLSAIAQIGLAFITGGATAPGAVASAAQAVSIAGQAARALEKVVKILEQLEAVMEVVTAVKELVDSLEQIGHIVEAPVMPEMPSEADWSIFVNEIEAVAEQMPTEVAEVPAWKAKCKNVAALGREMSITAAHISQLQYDIWVQGMLREIAQSQADKLAAIQPVDLTNYLEMVTQMDMRTSRMLLGLINILRIQNAALMYEYLLTPTQLTAWPLAMDTVGTLLIQQESSALIGLAQLGPPSDYTSTHVVKDIPVSLLLDGDDWEFEIPVQDGTTFPSSWSRVRIRHLEMHFVQAGGDEQQQIIHQPATQTGSVYILLQGSTIFHDRRRDEVMTFEAAVPLNYHYGYRLDTGETTVTNVPSEHFANTFMQMTPFTRWRLRLSASAAENAGLAFPTATAPDSTTQIVITFHVSAIRQIDWRHDE

SEQ ID NO: 981 - protein, 849 aa, Dryopteris marginalis
MAVMDYSEIYRDLNQISMGVDRVEFSEVMVIHRMYVRLADLDVGELAGAESVKRVYVFADVVELAPGTRMQMPGSVTVIILCRLLQFPTDGSQAATLQLPFMKLHALLRERHTSEITAADGMNWGTYIHGEEVQVIIPWSTVNSILRVWADGSSMTSSFHNVFDEPGRIVSTTVFTRPGAPDNTTLSAEPGMSILNSFLLHTVSPSAFSVLARQSSNISFTNIPVDVVTDPNILLGIQTNVLIAELVQVCHPSPEIFAAVAEHLNWLNKIMLQVVKNETQLQGTESYNECLALLGRIQSVIKIARLGLVVPQLQYRMYSSLINQMAQVAQNYDREFKQFKLFIIQNQILGSYLLQQNRVFADREQQMESFHSVVISQRKEELDSATTKIERLSLQMEAENDAMEQAKKEMDEGLRKYQNEQVARAVFSVLSAIAQIGLAFITGGATAPGAVASAAQAVSIAGQAARALEKVVKILEQLEAVMEVVTAVKELVDSLEQIGHIVEAPVMPEMPSEADWSIFVNEIEAVAEQMPTEVAEVPAWKAKCKNVAALGREMSITAAHISQLQYDIWVQGMLREIAQSQADKLAAIQPVDLTNYLEMVTQMDMRTSRMLLGLINILRIQNAALMYEYLLTPTQLTAWPLAMDTVGTLLIQQESSALIGLAQLGPPSDYTSTHVVKDIPVSLLLDGDDWEFEIPVQDGTTFPSSWSRVRIRHLEMHFVQAGGDEQPQIIHQPATQTGSVYILLQGSTIFHDRRRDEVMTFEAAVPLNYHYGYRLDTGETTVTNVPSEHFANTFMQMTPFTRWRLRLSASAAENAGLAFPTATAPDSTTQIVITFHVLAIRQIDWRHDE

SEQ ID NO: 982 - protein, 849 aa, Dryopteris marginalis
MAVMDYSEIYRDLNQISMGVDRVEFSEVMVIHRMYVRLADLDVGELAGAESVKRVYVFADVVELAPGTRMQMPGSVTVIILCRLLQFPTDGSQAATLQLPFMKLHALLRERHTSEITAADGMNWGTYIHGEEVQVIIPWSTVNSILRVWADGSSMTSSFHNVFDEPGRIVSTTVFTRPGAPDNTTLSADPGMSILNSFLLHTVSPSAFSVLARQSSNISFTNIPVDVVTDPNILLGIQTNVLIAELVQVCHPSPEIFAAVAEHLNWLNKIMLQVVKNETQLQGTESYNECLALLGRIQSVIKIARLGLVVPQLQYRMYSSLINQMAQVAQNYDREFKQFKLFIIQNQILGSYLLQQNRVFADREQQMESFHSVVISQRKEELDSATTKIERLSLQMEAENDAMEQAKKEMDEGLRKYQNEQVARAVFSVLSAIAQIGLAFITGGATAPGAVASAAQAVSIAGQAARALEKVVKILEQLEAVMEVVTAVKELVDSLEQIGHIVEAPVMPEMPSEADWSIFVNEIEAVAEQMPTEVAEVPAWKAKCKNVAALGREMSITAAHISQLQYDIWVQGMLREIAQSQADKLAAIQPVDLTNYLEMVTQMDMRTSRMLLGLINILRIQNAALMYEYLLTPTQLTAWPLAMDTVGTLLIQQESSALIGLAQLGPPSDYTSTHVVKDIPVSLLLDGDDWEFEIPVQDGTTFPSSWSRVRIRHLEMHFVQAGGDEQPQIIHQPATQTGSVYILLQGSTIFHDRRRDEVMTFEAAVPLNYHYGYRLDTGETTVTNVPSEHFANTFMQMTPFTRWRLRLSASAAENAGLAFPTATAPDSTTQIVITFHVLAIRQIDWRHDE

SEQ ID NO: 983 - protein, 849 aa, Dryopteris intermedia
MAVMDYSEIYRHLNQISMDVDRVEFSEVMVIHRMYVRLADLDVGELVGAESVKRVYVFADVVELAPGTRMQMPGSVTVIILCRLLQFPTDGSQAATLQLPFMKLHALLRERFTSEITAADGMNWGTYIHGDEVQVIIPWSTVNSILRVWADSSSMTSSFHNVFDEPGRIVSTTSFTRPGAPDNTTLSAHPGMSVLNSFLLYTVSPSAFSVLDRQSSNISFTNIPVDVMTDPNILLGIQTNVLIAELVQVCHPSPEIFAAVAEHLNWLNKIMLQVVKNETQLQGTESYNECLALLGRIQSVIKIARLGLVVPQLQYRMYSSLINQMAQIAQNYDRDFRQFKLFIIQNQILGSYLLQQNRVFADREQQMESFHSVVISQRKEELDNATTKIERLSLQMEAENGAMEQAKKEMDEGLRKYQNEQVARAVFSVLSAIAQIGLAFITGGATAPGAVASAAQAVSIAGQAARALEKVVKILEQLEAVMEVVTAVKELVDSLEQIGHIVEAPVMPEMPSEADWSIFVNEIEAVAEQMPTEVAEVPAWKAKCKNVAALGREMSITAAYISQLQYDIWVQGMLREIAQSQADKLAAIQPVDLTNYLEMVTQMDMRTSRMLLGLVNILRIQNAALMYEYLLTPTQLTAWPLSMDTVGTLLIQQESSALIGLAQLGPPSDYTSTHVVKDIPVSLLLDGGDWEFEIPVQDGTTFPSSWSRVRIRHLEMHFVQASGDEQQQIIHQPATQTGSVYILLQGSTIFHDRRRDEVMTFEAAVPLNYHYGYRLDTGETTVTNVPSEHFANTFMQMTPFTRWRLRLSASAAENAGLAFPTATAPDSTTQIVITFHVSAIRQIDWRHDE

SEQ ID NO: 984 - protein, 849 aa, Dryopteris intermedia
MAVMDYSELYRDLNQISMGVDRVEFSEVMVIHRMYVRLADLDVGELVGAERVKRVYVFADVVELAPGPKMQMPGSVTVIILCRLLQFPTNRSQAATLQLPFMKLRAFLREENRSEITAADGMNWGTYIHGEEVQVFIPSSTVNSILTVWADGSIITSSFHNVFDEPGRIVSTTVFTSPGAPDNTTMRAEPGMSSLNWFLLRTVSPSAFSVLARQSSNISFTNIPVDVVTDPNILLGIQTNVLIAELVQVCHPSPDIFAAVAEHLNWLNKILLQVVKNETQLQGTESYNECLALLGRIQSVMKIVRPGLVVPQLQYRMYSSLINQMAQVAQNYDRDFKQFKLFIIQNQILGSYLLQQNRVFADREQQMESFHSVVISQRKEELDSTTTKIERLSLQMEAENGAMEQAKKEMDEGLRKYQNEQVARAVFAVLSAVAQIGLAFITGGATAPGAVASAGQAVSIAGQAAQALEKVVKILERLEAVMEVVTAVKELVDSLEQIGLIVEAPVMPEMPSEADWSIFVNEIEAVAEQMPTEVAEVPAWKAKCKNVAALGREMSITAAYISQLQYDIWVQGMLREIAQSQADKLAAIQPVDLTNYLEMATQMDMRTSRMLLGLINMLRIQNAALMYEYLLTPTQLTAWPVTMDTVGTLLIQQENSALIGLAQLGPPSDYTSTHVVKDIPVSLLLDGADWEFEIPVQDGTTFPSSWSRVRIRHLEMHFVQASGDEQQQIIHQPATQTGSVYILLQGSTIFHDRRRDEVMTFEAAVPLNYHYGYRLDTGETTVTNVPSEHFANTFMQMTPFTRWRLRLSASAPENAGLAFPTATALDSTTQIVITFHVSAIRQIDWRHDE

SEQ ID NO: 985 - protein, 849 aa, Dryopteris intermedia
MAVMDYSELYRDLNQISMGVDRVEFSEVMVIHRMYVRLADLDVGELVGAERVKRVYVFADVVELAPGPKMQMPGSVTVIILCRLLQFPTNRSQAATLQLPFMKLRAFLREENRSEITAADGMNWGTYIHGEEVQVFIPSSTVNSILTVWADGSIITSSFHNVFDEPGRIVSTTVFTSPGAPDNTTMRAEPGMSSLNWFLLRTVSPSAFSVLARQSSNISFTNIPVDVVTDPNILLGIQTNVLIAELVQVCHPSPDIFAAVAEHLNWLNKILLQVVKNETQLQGTESYNECLALLGRIQSVIKIARLGLVVPQLQYRMYSSLINQMAQIAQNYDRDFRQFKLFIIQNQILGSYLLQQNRVFADREQQMESFHSVVISQRKEELDNATTKIERLSLQMEAENGAMEQAKKEMDEGLRKYQNEQVARAVFSVLSAIAQIGLAFITGGATAPGAVASAAQAVSIAGQAARALEKVVKILEQLEAVMEVVTAVKELVDSLEQIGHIVEAPVMPEMPSEADWSIFVNEIEAVAEQMPTEVAEVPAWKAKCKNVAALGREMSITAAYISQLQYDIWVQGMLREIAQSQADKLAAIQPVDLTNYLEMVTQMDMRTSRMLLGLVNILRIQNAALMYEYLLTPTQLTAWPLSMDTVGTLLIQQESSALIGLAQLGPPSDYTSTHVVKDIPVSLLLDGADWEFEIPVQDGTTFPSSWSRVRIRHLEMHFVQASGDEQQQIIHQPATQTGSVYILLQGSTIFHDRRRDEVMTFEAAVPLNYHYGYRLDTGETTVTNVPSEHFANTFMQMTPFTRWRLRLSASAAENAGLAFPTATAPDSTTQIVITFHVSAIRQIDWRHDE

SEQ ID NO: 986 - protein, 849 aa, Dryopteris intermedia
MAVMDYSEIYRHLNQISMDVDRVEFSEVMVIHRMYVRLADLDVGELVGAESVKRVYVFADVVELAPGTRMQMPGSVTVIILCRLLQFPTDGSQAATLQLPFMKLHALLRERFTSEITAADGMNWGTYIHGDEVQVIIPWSTVNSILRVWADSSSMTSSFHNVFDEPGRIVSTTSFTRPGSPDNTTLSAHPGMSVLNSFLLYTVSPSAFSVLDRQSSNISFTNIPVDVMTDPNILLGIQTNVLIAELVQVCHPSPEIFAAVAEHLNWLNKIMLQVVKNETQLQGTESYNECLALLGRIQSVIKIARLGLVVPQLQYRMYSSLINQMAQIAQNYDRDFRQFKLFIIQNQILGSYLLQQNRVFADREQQMESFHSVVISQRKEELDNATTKIERLSLQMEAENGAMEQAKKEMDEGLRKYQNEQVARAVFSVLSAIAQIGLAFITGGATAPGAVASAAQAVSIAGQAARALEKVVKILEQLEAVMEVVTAVKELVDSLEQIGHIVEAPVMPEMPSEADWSIFVNEIEAVAEQMPTEVAEVPAWKAKCKNVAALGREMSITAAYISQLQYDIWVQGMLREIAQSQADKLAAIQPVDLTNYLEMVTQMDMRTSRMLLGLVNILRIQNAALMYEYLLTPTQLTAWPLSMDTVGTLLIQQESSALIGLAQLGPPSDYTSTHVVKDIPVSLLLDGGDWEFEIPVQDGTTFPSSWSRVRIRHLEMHFVQASGDEQQQIIHQPATQTGSVYILLQGSTIFHDRRRDEVMTFEAAVPLNYHYGYRLDTGETTVTNVPSEHFANTFMQMTPFTRWRLRLSASAAENAGLAFPTATAPDSTTQIVITFHVSAIRQIDWRHDE

SEQ ID NO: 987 - protein, 810 aa, Deparia acrostichoides
MADIDYSVLYKDVNQISIRLEKMDFSEVMAVHRMFVRMDDLDVSSGTGLLVGAEKVKRLYVFADVVELPSKQVRLPGSDMIVILCRIFVRNGRHNMELFLPSMNMSMVAAGNGSIRGANLTTTMLSSSSNALQFKLQSGSMTSAVRLKDVDVAAALTCDVQAASASMPLTVMTTGTSPGNIWVLGMTTAIVVPESAVAVITDANILLGMQVTVLIAELVKTAHNSDVVIAAITRHVEWLNHLLVQAHAAAPNEDIVALLYRTQAFIKLQREGLVVPRLQYRMYKNLIDRMVQVAQNYDQDFKQLKLYLEQNKILGSYLLEQNKAFAAKEKDMDAFHSQIIALRTTELNNTIERMDALSKQMDEENAAMEQAKKDMDAGLVEYQNKQVANALFAVLGAIASIGLAFATGGATAPGAVAAAGAAVTAAGKAAEGLKKVLEILEGLQVVMEVVAAIKELVESLQGIGQLVDAPEMPDLPSNADWEIFVNEVEAVAEQMPTEVTQVPAWKAKCKNVAALGREMSTMAAHIAELQYQIQVQEMLREIAQKQADRLSSITPADLTNYLEMVSQMDMRTTRMLLELIRVLYIQNAALQYEYLQTPAPLSAWPVDMQTVWALLVQQETTAITGLLELGAPSDFTQEYVVKDIPVRLLLEGQDWEFELPVMNADFPSTWSRVRIHHVDMQFDAAGTPDVHVPTTKSGEVYMLLQSSRFFDDRAKRENEFISYQAGTGLFYQYAYRLATGEATVTNIPTEEYANTFMRLAPFTRWRLRLSSSAVENQGIAFPTATSADDTTQIKITFYVSAIRRISTRTI

SEQ ID NO: 988 - protein, 810 aa, Deparia acrostichoides
MADIDYSVLYKDVNQISIRLEKMDFSEVMAVHRMFVRMDDLDVSSGTGLLVGAEKVKRLYVFADVVELPSKQVRLPGSDMIVILCRIFVRNGRHNMELFLPSMNMSMVAAGNGSIRGANLTTTMLSSSSNALQFKLQSGSMTSAVRLKDVDVAAALTCDVQAASASMPLTVMTTGTSPGNIWVLGMTTAIVVPESAVAVITDANILLGMQVTVLIAELVKTAHNSDVVIAAITRHVEWLNHLLVQAHAAAPNEDIVALLYRTQAFIKLQREGLVVPRLQYRMYKNLIDRMVQVAQNYDQDFKQLKLYLEQNKILGSYLLEQNKAFAAKEKDMDAFHSQIIALRTTELNNTIERMDALSKQMDEENAAMEQAKKDMDAGLVEYQNKQVANALFAVLGAIASIGLAFATGGATAPGAVAAAGAAVTAAGKAAEGLKKVLEILEGLQVVMEVVAAIKELVESLQGIGQLVDAPEMPDLPSNADWEIFVNEVEAVAEQMPTEVTQVPAWKAKCKNVAALGREMSTMAAHIAELQYQIQVQEMLREIAQKQADRLSSITPADLTNYLEMVSQMDMRTTRMLLELIRVLYIQNAALQYEYLQTPAPLSAWPVDMQTVWALLVQQETTAITGLLELGAPSDFTQEYVVKDIPVRLLLEGQDWEFELPVINADFPSTWSRVRIHHVDMQFDAAGTPDVHVPTTKSGEVYMLLQSSRFFDDRAKRENEFISYQAGTGLFYQYAYRLATGEATVTNIPTEEYANTFMRLAPFTRWRLRLSSSAVENQGIAFPTATSADDTTQIKITFYVSAIRRISTRTI

SEQ ID NO: 989 - protein, 866 aa, Arachnoides simplicolor variegata
MEYSNLYRDVNTLSLSLQRTELSEVMVVHRMHVKLDELHVQTPAGSERVQRLYVVADVVELPFGSVSLPCKASLVILCRVLYMPHSGLPLSPICHLYLPNMSVRVVYGPSGMEVYPMATDGSAVAVYIHADRVIWRQDDWAVVRLMSLQITGPESTFSAPHLPEPVQAFTALTNVIMDIGQRIPASASDLQRSDEIELLTRFGLGDQLRVDFPGSSWSIAMVNPSATFNIFPIPHAQPVIREVLTDPHVIIGLQMNMLTAELVQAAHNAPLLINAVTRHVEWLNKILVEALPVASDSEDLLALLFRTETYLKMAAESRPVVPRLQYHMYRNLIHSMVQVAQAYDNEFQRLKLFIAQNEILGSYLLEQNRALARREEEMSSYHSQVVSLRRTELNNCLERMDQLSVQMENENKAMEEAKDEMDKALEAHERRELARALFAVLGAIATVALTFATGGAAAPLAVAAAGQAVTAAGALARGLQRVVEILEGLQALMDLVVIIRELVENLQSIGQLIDAPEMQEMPSNADWLIFVNEVEAVAEQMPAEVVGSVAVWKAKCRNVAVLGQEMCTMAAHIAELQQQIKLEELLQEIAKRQADRLLGISAADLSSFTEMLTQIEMRTTRLLVQLIKLLHIQNVAINYEYLFPAKGQLSSWPVTMHTVWQMLLQQESSAIMGLLTLGTSTDFARTYVVQDIPVGLLVDGFDWQFAIPVMDDSLAFPIGFSRVRIRHVELKFSATDSDGSVIVHQPQTDNGFIYILLQSAQSFSDRRERQAMDYEASMGLAYPYAYNLTTGVPTLTNIPSEQYANTFMQMTPFTGWRLRLSSSAQENRGLTFPTAASPDDSTQISITFHITAIRAIDVRSMGDEGQ

SEQ ID NO: 990 - protein, 866 aa, Arachnoides simplicolor variegata
MEYSNLYRDVNTLSLSLQRTELSEVMVVHRMHVKLDELHVQTPAGSERVQRLYVVADVVELPFGSVSLPCKASLVILCRVLYMPHSGLPLSPICHLYLPNMSVRVVYGPSGMEVYPMATDGSAVAVYIHADRVIWRQDDWAVVRLMSLQITGPESTFSAPHLPEPVQAFTALTNVIMDIGQRIPASASDLQRSDEIELLTRFGLGDQLRVDFPGSSWSIAMVNPSATFNIFPIPHAQPVIREVLTDPHVIIGLQMNMLTAELVQAAHNAPLLINAVTRHVEWLNKILVEALPVASDSEDLLALLFRTETYLKMAAESRPVVPRLQYHMYRNLIHSMVQVAQAYDNEFQRLKLFIAQNEILGSYLLEQNRALARREEEMSSYHSQVVSLRRTELNNCLERMDQLSVQMENENKAMEEAKDEMDKALEAHERRELARALFAVLGAIATVALTFATGGAAAPLAVAAAGQAVTAAGALARGLQRVVEILEGLQALMDLVVIIRELVENLQSIGQLIDAPEMQEMPSNADWLIFVNEVEAVAEQMPAEVVGSVAVWKAKCRNVAVLGQEMCTMAAHIAELQQQIKLEELLQEIAKRQADRLLGISAADLSSFTEMLTQIDMRTTRLLVQLIKLLHIQNVAINYEYLFPAKGQLSSWPVTMHTVWQMLLQQESSAIMGLLTLGTSTDFARTYVVQDIPVGLLVDGFDWQFAIPVMDDSLAFPIGFSRVRIRHVELKFSATDSDGSVIVHQPQTDNGFIYILLQSAQSFSDRRERQAMDYEASMGLAYPYAYNLTTGVPTLTNIPSEQYANTFMQMTPFTGWRLRLSSSAQENRGLTFPTAASPDDSTQISITFHITAIRAIDVRSMGDEGQ

SEQ ID NO: 991 - protein, 697 aa, Arachnoides simplicolor variegata
MEYSNLYRDVNTLSLSLQRTELSEVMVVHRMHVKLDELHVQTPAGSERVQRLYVVADVVELPFGSVSLPCKASLVILCRVLYMPHSGLPLSPICHLYLPNMSVRVVYGPSGMEVYPMATDGSAVAVYIHADRVIWRQDDWAVVRLMSLQITGPESTFSAPHLPEPVQAFTALTNVIMDIGQRIPASASDLQRSDEIELLTRFGLGDQLRVDFPGSSWSIAMVNPSATFNIFPIPHAQPVIREVLTDPHVIIGLQMNMLTAELVQAAHNAPLLINAVTRHVEWLNKILVEALPVASDSEDLLALLFRTETYLKMAAESRPVVPRLQYHMYRNLIHSMVQVAQAYDNEFQRLKLFIAQNEILGSYLLEQNRALARREEEMSSYHSQVVSLRRTELNNCLERMDQLSVQMENENKAMEEAKDEMDKALEAHERRELARALFAVLGAIATVALTFATGGAAAPLAVAAAGQAVTAAGALARGLQRVVEILEGLQALMDLVVIIRELVENLQSIGQLIDAPEMQEMPSNADWLIFVNEVEAVAEQMPAEVVGSVAVWKAKCRNVAVLGQEMCTMAAHIAELQQQIKLEELLQEIAKRQADRLLGISAADLSSFTEMLTQIDMRTTRLLVQLIKLLHIQNVAINYEYLFPAKGQLSSWPVTMHTVWQMLLQQESSAIMGLLTLGPSTDFARTCCPRHTSRITG

SEQ ID NO: 992 - protein, 866 aa, Arachnoides simplicolor variegata
MEYSNLYRDVNTLSLSLQRTELSEVMVVHRMHVKLDELHVQTPAGSERVQRLYVVADVVELPFGSVSLPCKASLVILCRVLYMPHSGLPLSPICHLYLPNMSVRVVYGPSGMEVYPMATDGSAVAVYIHADRVIWRQDDWAVVRLMSLQITGPESTFSAPHLPEPVQAFTALTNVIMDIGQRIPASASDLQRSDEIELLTRFGLGDQLRVDFPGSSWSIAMVNPSATFNIFPIPHAQPVIREVLTDPHVIIGLQMNMLTAELVQAAHNAPLLINAVTRHVEWLNKILVEALPVASDSEDLLALLFRTETYLKMAAESRPVVPRLQYHMYRNLIHSMVQVAQAYDNEFQRLKLFIAQNEILGSYLLEQNRALARREEEMSSYHSQVVSLRRTELNNCLERMDQLSVQMENENKAMEEAKDEMDKALEAHERRELARALFAVLGAIATVALTFATGGAAAPLAVAAAGQAVTAAGALARGLQRVVEILEGLQALMDLVVIIRELVENLQSIGQLIDAPEMQEMPSNADWLIFVNEVEAVAEQMPAEVVGSVAVWKAKCRNVAVLGQEMCTMAAHIAELQQQIKLEELLQEIAKRQADRLLGISAADLSSFTEMLTQIDMRTTRLLVQLIKLLHIQNVAINYEYLFPAKGQLSSWPVTMHTVWQMLLQQESSAIMGLLTLGPSTDFARTYVVQDIPVGLLVDGFDWQFAIPVMDDSLAFPIGFSRVRIRHVELKFSATDSDGSVIVHQPQTDNGFIYILLQSAQSFSDRRERQAMDYEASMGLAYPYAYNLTTGVPTLTNIPSEQYANTFMQMTPFTGWRLRLSSSAQENRGLTFPTAASPDDSTQISITFHITAIRAIDVRSMGDEGQ

SEQ ID NO: 993 - protein, 859 aa, Osmunda regalis
MWCGSCEDPQPPSPIQPEDISMASVDYGQIYQNVNQITRPVATKECSEVMAIHRMYLQLDNLDVELLTKANTVKQLVVFVDVVEIESDNVKLPGSSQVTIVCRILHVKKNNVALNFDFLGPTKCNGRSTRGYARIMDDSPVFELSIYAQQLVGDDGAMLRVRHPVTVATIENGHDYEVREGNMEWQIWPYSSTGLSSAARSHELKTIGDHGRERTWLIIEQEWSRFIAVVPDLIPLRWLTDSNVLLGMEATLLTAELILSYQTDAQATVAAALQHVEWLNTQLLQVVEETDLEATGERLLSLLFRAQSLLKLPVDGSHTLIVPRLEYGLYRDLINRMTDVAEKYNSEFMQMNLFIQQNEILGTYLLEQNKVFAQKEKDMEVFHSSLVTLKQQELTSAKSKMAQLETQLTEQKAAMDQAKKEMDEGLRRYNDAQVANAFFAVILGVASIGLAILTGGATAGAAVAGAAQAVSAVSAVANTLGRVVDILEGLQKVMEVLEAINDLTTSLAAINEMVEAPQMPDMPSEADWAIFENEIEAVAESMPTEVSEVPTWKAKCKNVAAVCREITTTATYIGQLQYDLLVQSMQQQIAMRQAERLEAIQPADLTNYLEMATELDMRTSRMLLGLLKVLTLQNGALLYHFLLPPKPFTGWVSMDIVRNALVQHDIEAVIARTELGPSTDFTRTYVVEGIPVTLLLEGDDWNFTIPVHDSAFPSNWSRVRIRYLEMRFSSSEEVHQPTTNTGEVYILLQAARMFDDRLKGDVLHYQAAVPLQYQYAYDLNTGETTQSNLPSEEHTGEYMRMTPFTRWRLRLSASAYENQGLAFPTATALDSTTQISITFFLTAIRQIDTRFTELMDEPQ

SEQ ID NO: 994 - protein, 948 aa, Nephrolepis biserata
MLTHLIFPLCVQGGNVACKERYTLLPYNFLCLHRQDSMASSASVGVADWRELYRDLNQVSDRMRFDQLEFSELMVIHRMHIKVSELNMGHLEGSEKVKRFYVFADVVEYDLVKSDGEVAHLPGSISVVFICREWHVHSPINARRDRDPPMYVFSDWVLRLRLPHMRWHLNEPREDMHRIDPETMQEFSEPSFCVYADDVSVAYYNYQDGESSWDPALGFPLPQLLALCPVVFYDNLSAPIPDHLLVTRMQMSTTTVTRSSTRVRFTMRYEDNQDVVKDIATMPQGTRVIFKREGRLSDFVVGGSEGSITSLDDGADGSRLMPAWSLLRQDSKFPIELLTDPNILPAMQTSMLIGELVEVGNPSVAITEVVHKHVKWLNKLLLQVIEEKNGKDVEDYIELSFRAQYVIKEVGRIRGLVVPQLQYDVYSNLINRMAQVAESYDQALRQFRLSIQNTKISGGFLLEQNRAFADKEKDMDVLYSEIITQRQIELDNTLQKLERLSLQMETQQADMEQAQADMEAGLRQFQNRQAARALFAVLGAIAAVALTVVTGGAAAPLAVGAAGTAVTVAGSVVAGLKRVVDVLKRLQAVMEVVALIKELFDTLQDLNQAVELPDMPDMPLQSDWLIFVNEVEAVAEGMPTEVSEVVAWKTKCKNVAVLGQEMMTSAAYISQLQYDIMVQNMLQQIARKQADRLSAIQLPDLKNFTEMVVQMDMRTTRLLVALIKVVYIQNAALMYQYLSAPTPVSAWPVNMDTVWRMLVQHEQLAIQGLVRLGPAFDIVRTYVVKGIPVSLLLDGDDYEFEIPAEDPLTFPLPLSRVRIHHLEMKFVQGVAQVHIPTTATGAIYILLQGSRNFHDRNEGEIMHFEAATALDYHYAYHLETGETNVTNLPSAEFLRTFMRMTPFSNWRLRLSASAEENQGLAFPTATSADATTQIAITFHISAIRRVSL

SEQ ID NO: 995 - protein, 1079 aa, Gymnocarpium dryopteris
MGENVEDNEYHYDYEAAYKEIDEHFRTVVKRECSEEMMVVHRMYLRLDDIDAGHLPNPEGVKIMLVYADVVDVESERLEFAGRFEVYIMCRLLRVKARHGSTLDFKYFTPVGACMSILQLPAWTMDEQLHIWAQQLMGGESEQELAIRAEFWAYEETTRVQVVGEWQVKPYGRECTKDESVVRTCQTLQKPGFTYRPDESDFQEAQSEVEDLLCTGPRWFKECFHLVSPEPISVNWSDELCETIEGAFSSLELALSRTCVIPSAAFLHLQWLTRHLAQMRSTTSVSSTTSAIINRLELLLSHAKTLLNNVTYLKLHTRIIGEVVYAEVYKNVRRAFSTRECSELMTMQRMYFLLDDLDAGLFKNPQVVKELIVYADIVEIGSTTLRILGSTRVVIMCRLLSLKGSQEFSPFILNFPHISHDHTSSCLSLYVSPAMLLNQLPTSGVYIYAQELIISNPLNPTTCFSTSFQSSIPVEILGDSNVLPLIQAALHSLTYQLSATANVKTAQDHLQWLITHLAQVRLCHGMQEENKTNLHESSLNDLRDLLLHAQLLLKMSNESESVIVPSLRYEKYSKLIERMATAASDYNSQFLQVDYFIRQNQITGDYLLQQNKIFIEKERDVEYFHSLLTECKKTELDAAISKMKNLKEQLTTQEAEMNQAKKDMHTGLIANAVFTLFEAVFELGLAASTLANAATTLRRFKEVVDKAKKAKDTLEEIVKMVKMVENICSYFDALMDVYTLDIEKLQQGLVMPEMPSKADWEIFENELTAVAENMPLEISQVPIWKAKCKNVASVFRELITTASYMKQLEYDILVEDMEAKIAAKQAERLDMTLADLKNYEEMAMQLEMRTTRILSHLLKALKVQSGALLYHYLLPPRSITNWMDMDAVTNALLSYEELAVEGLEQLGTPTDYRREYVVPDIPIALLMNGQDWIFTIPIDDYLVFPAHWSTVRIKYVEMRFNEGHYLPSTSSGQVYFLLQASRMFQDRKKGEVLNYEAAIPLDYQFAYELETGHPTVTNKPTYEYKGTFMRMTPFTQWRLRLSASAHENQGLSFPTAREANSTTQISITFYLTAIREKSI

SEQ ID NO: 996 - protein, 862 aa, Astrolepis sinuata Jo Levy
MAVPDYYRIYKNVNQVTRAVASTQCSEVMSIHRMYFKLDMLEVELLTDARTVKQLVVFADVVEIEKDKVQLPASSKVTVVCRILLVKKENVALEFTLLAPVACESGIIEGSVARIRSSSPAGVGLSIYAQQVVCSTASALLQVEHPVTVQRGYPESCSHPLQVIPGNIHWRIRITSSHDGNLSTAERSQEIRAPMHGGITWSVMPTEWSSFISLLQPVLIPLDSMADPNVILGMQSSLLIAELVLSYQTHEPDTVSAALQHVQWLGTNLLQVVADQNSGQQLLDRPDQTTQELLTLLARSQSLLKMPLDGSQTLIVPRLEYGQYRNLISSMATVAEAYNSEFKQVDLFIQQNQILGSYLLQQNKAFAQREKDMEAFYGLVVARKHEELRAAQDRMNELNAQLTQQREAMDEAKEKMDKGLQKYKDEQVAKAFFAVLKGVLEVGLAIFTGGATAGAAVKGASEAVIAVSDLAGMLQTVLNIMEGMEKVMEVLNAMKDLTTSLSEINQMVEAPKMPLMPSKMEWDIFENEMEEVAESMPTEVIEARTWKTKCRNVAAVCREICTTAAYIGQLEYDLFVNSSQEEIAKKHAERLEVIQPADLKNYLEMATQLDMRTSRMLLGLLKVLTLQNGALLFHYLLPPKPFTGWVTMDMVRNALVQHEADALAARERLGPSTDFTQTYVVSDIPLSLLLDGDDWIFTIPTDDPTFPLSWSRVRIRYLEMKFSGGEDYHKPTTNSGQVYILLQAARIFQDRLFNEVLHYEAAMPLRYQYAYDLKSGETTLSNRPSQQHDGEFMQMTPFCQWRLRLSASAIENLGLAFPTAECASGDLTYQRPFTQISIIFYLTAIRRIDTRHERSRDGFVES

SEQ ID NO: 997 - protein, 838 aa, Pyrrosia lingua
MGNAMTGPSYEEIYKNANYIHRSVATPVCSEVMSVSRMHMAVSELDVKRLKNPEIVKELYVFADVLFWDDGSTIWPGAEVVFVMSRVTVLDMAILASTGAAEAAANVTASIRVPWLNVPSTTFNISHQDQIVSPFSCSIRPKHSTTRAGTAPAGFFLHTQQLMDTSHATKPAISDFVLKLETREGSFAHDEGVDESIREIFNDARLFWADVNLTLLWAMEATVLVAELILTYMSSSTRTVKEATLHLKWMNQLLIHALETKDGEPDAAVERLFNTLALQVPLILNNPSLVAGLVVPRLQYSTYRNLITTMAHLADGYTREFQQLVMFMDQNEVLGTFLLEQNQAFAAKERDMESFHAELHKVKTNDLIQALATLEQLEVLMTEMNAEMEQAQQDMEEGLRRFRNRQVARAVFSVFGSIVAIASAFFTGGATAGAAVSSTKNAVNQVVEMRSSLERIVETLEKLLLVSDFLVAMKELINAVQNIHDAAANVPALPDMPTDAEWTIFENEIEAVAAEMPEEVSEVLVWKTKCKNMAAIGREMVTMATVISQLQYDVRMHELLQEISRNQAERLEAIRPVDVRNYQEMATQLEMRTTQILLGLLEVLSLQNAAIQYQYLMPPSPVIMTNTIITMSDVWTELLQQEAAAIVALSELGFPTDRKVTYTVKGIPVGVLLDGQDWDFSISTEDGDHFPYGWSRVRISYVELKFGSASLGSTAQAENEEIHEPVTDTGEVYMVLRGEQTFVDRKRGEKVRYEAVAPVKYQYAYQLETGETTEQNRPTEEFTNHFMRMTPFTRWKLRIPGSARENRGLAFPKATAMDATTQITIHFYVTAIRAADWH

SEQ ID NO: 998 - protein, 838 aa, Pyrrosia lingua
MGNAMTGPSYEEIYKNANYIHRSVATPVCSEVMSVSRMHMAVSELDVKRLKNPEIVKELYVFADVLFWDDGSTIWPGAEVVFVMSRVTVLDMAILASTGAAEAAANVTASIRVPWLNVPSTTFNISHQDQIVSPFSCSIRPKHSTTRAGTAPAGFFLHTQQLMDTSHATKPAISDFVLKLETREGSFAHDEGVDESIREIFNDARLFWADVNLTLLWAMEATVLVAELILTYMSSSTRTVKEATLHLKWMNQLLIHALETKDGEPDAAVERLFNTLALQVPLILNNPSLVAGLVVPRLQYSTYRNLITTMAHLADGYTREFQQLVMFMDQNEVLGTFLLEQNQAFAAKERDMESFHAELHKVKTNDLIQALATLEQLEVLMTEMNAEMEQAQQDMEEGLRRFRNRQVARAVFSVFGSIVAIASAFFTGGATAGAAVSSTKNAVNQVVEMRSSLERIVETLEKLLLVSDFLVAMKELINAVQNIHDAAANVPALPDMPTDAEWTIFENEIEAVAAEMPEEVSEVLVWKTKCKNMAAIGREMVTMATVISQLQYDVRMHELLQEISRNQAERLEAIRPVDVRNYQEMATQLEMRTTQILLGLLEVLSLQNAAIQYQYLMPPSPVIMNNTIITMSDVWTELLQQEAAAIVALSELGFPTDRKVTYTVKGIPVSVLLDGQDWDFSISTEDGDHFPYGWSRVRISYVELKFGSASLGLTAQAENEEIHEPVTNTGEVYMVLRGEQTFVDRKRGEKVRYEAVAPIKYQYAYQLETGETTEQNRPTEEFTNHFMRMTPFTRWKLRIPGSARENRGLAFPKATAMDATTQITIHFYVTAIRAADWH

SEQ ID NO: 999 - protein, 838 aa, Pyrrosia lingua
MGNAMTGPSYEEIYKNANYIHRSVATPVCSEVMSVSRMHMAVSELDVKRLKNPEIVKELYVFADVLFWDDGSTIWPGAEVVFVMSRVTVLDMAILASTGAAEAAANVTASIRVPWLNVPSTTFNISHQDQIVSPFSCSIRPKHSTTRAGTAPAGFFLHTQQLMDTSHATKPAISDFVLKLETREGSFAHDEGVDESIREIFNDARLFWADVNLTLLWAMEATVLVAELILTYMSSSTRTVKEATLHLKWMNQLLIHALQTKDGEPDAAVERLFNTLALQVPLILNNPSLVAGLVVPRLQYSTYRNLITTMAHLADGYTREFQQLVMFMDQNEVLGTFLLEQNQAFAAKERDMESFHAELHKVKTNDLIQALATLEQLEVLMTEMNAEMEQAQQDMEEGLRRFRNRQVARAVFSVFGSIVAIASAFFTGGATAGAAVSSTKNAVNQVVEMRSSLERIVETLEKLLLVSDFLVAMKELINAVQNIHDAAANVPAFPDMPTDAEWTIFENEIEAVAAEMPEEVSEVLVWKTKCKNMAAIGREMVTMATVISQLQYDVRMHELLQEISRNQAERLEAIRPVDVRNYQEMATQLEMRTTQILLGLLEVLSLQNAAIQYQYLMPPSPVIMTNTIITMSDVWTELLQQEAAAIVALSELGFPTDRKVTYTVKGIPVGVLLDGQDWDFSISTEDGDHFPYGWSRVRISYVELKFGSASLGSTAQAENEEIHEPVTDTGEVYMVLRGEQTFVDRKRGEKVRYEAVAPVKYQYAYQLETGETTEQNRPTEEFTNHFMRMTPFTRWKLRIPGSARENRGLAFPKATAMDATTQITIHFYVTAIRAADWH

SEQ ID NO: 1000 - protein, 797 aa, Pyrrosia polydactyla
MIDYGAVYAHVNEVGRRLGTGKVKCTRVLAKQGMVVRLDELTMEELQDAGAVEQLVVFADVVEVSGTRVNFPGMFVTIVCRILVLLHDSLRLDLTLHSSWNTVTNNPARFSLFAQKIVSASAPARKSVVLQIRRPREDVSRVSTAASDQATAWGDIIFVVQTVPDAMRGRLETGVLASLGVLVDPNTIMGIQSTLLIAELILSYRTDLPETVQAAVEHAQWINSTLLAVEASLDSSAEEALELRNLLARAQMLLKFPTDGSQSLIVPRLEYRGYQSLIDRMVTVAESYNSELGQFMLFITQTQILQNELLARTKAFAAKERDVADLQSSIVSRKRTELLQAEQTMTRLNDILNQQAKDMEQAQNDMEQGLKEYKDREVARAFIGVLVAVVEIGVSFATGGLTALSGIRRSINAAKGLARLAEMIKAVIKVMEQLAEAMEVLNAVRALMDAVAVSKDIFEAPEMPDMPTIAEWDIFENEIELVAEGMPEEVSEARVWRVKCKNVAAVCREITRTGVYITQLQYELFVQAQQEAIATRHAERLEQIEAVNLDNYMEMATQIDMRTTRLLLGLLKMMSIQNAALQYHYLLPKEPFTGWPTIDIVRRRLIEKEIQAVHGLEALGMSTNFTRTFNVEDISVDLLLSGEDWNFTLSPESNSPFPLTFSRVRIRHVEMKFANTLAPRPSTTSGKLYILLQGSRTFQDRRTHQVLEYDAAVPIAYPYAYNLSTGETTLSNEPSQDDASNLLFFRMTPFTNWRLRLSSSAFENEGLLFPEGSTTTSMEITFHITAIRSIDTRLQVS

SEQ ID NO: 1001 - protein, 797 aa, Pyrrosia polydactyla
MIDYGAVYAHVNEVGRRLGTGKVKCTRVLAKQGMVVRLDELTMEELQDAGAVEQLVVFADVVEVSGTRVNFPGMFVTIVCRILVLLHDSLRLDLTLHSSWNTVTNNPARFSLFAQKVVSASAPARKSVVLQIRRPREDVSRVSTAASDQATAWGDIIFVVQTVPDAMRGRLETGVLASLGVLVDPNTIMGIQSTLLIAELILSYRTDLPETVQAAVEHAQWINSTLLAVEASLDSSAEEALELRNLLARAQMLLKFPTDGSQSLIVPRLEYRGYQSLIDRMVTVAESYNSELGQFMLFITQTQILQNELLARTKAFAAKERDVADLQSSIVSRKRTELLQAEQTMTRLNDILNQQAKDMEQAQNDMEQGLKEYKDREVARAFIGVLVAVVEIGVSFATGGLTALSGIRRSINAAKGLARLAEMIKAVIKVMEQLAEAMEVLNAVRALMDAVAVSKEIFEAPEMPDMPTIAEWDIFENEIELVAEGMPEEVSEARVWRVKCKNVAAVCREITRTGVYITQLQYELFVQAQQEAIATRHAERLEQIEAVNLDNYMEMATQIDMRTTRLLLGLLKMMSIQNAALQYHYLLPKEPFTGWPTIDIVRRRLIEKEIQAVHGLEALGMSTNFTRTFNVEDISVDLLLSGEDWNFTLSPESNSPFPLTFSRVRIRHVEMKFANTLAPRPSTTSGKLYILLQGSRTFQDRRTHQVLEYDAAVPIAYPYAYNLSSGETTLSNEPSQDDASNLLFFRMTPFTNWRLRLSSSAFENEGLLFPEGSTTTSMEITFHITAIRSIDTRLQVS

SEQ ID NO: 1002 - protein, 797 aa, Pyrrosia polydactyla
MIDYGAVYAHVNEVGRRLGTGKVKCTRVLAKQGMVVRLDELTMEELQDAGAVEQLVVFADVVEVSGTRVNFPGMFVTIVCRILVLLHDSLRLDLTLHSSWNTVTNNPARFSLFAQKIVSASAPARKSVVLQIRRPREDVSRVSTAASDQATAWGDIIFVVQTVPDAMRGRLETGVLASLGVLVDPNTIMGIQSTLLIAELILSYRTDLPETVQAAVEHAQWINSTLLAVEASLDSSAEEALELRNLLARAQMLLKFPTDGSQSLIVPRLEYRGYQSLIDRMVTVAESYNSELGQFMLFITQTQILQNELLARTKAFAAKERDVADLQSSIVSRKRTELLQAEQTMTRLNDILNQQAKDMEQAQNDMEHGLKEYKDREVARAFIGVLVAVVEIGVSFATGGLTALSGIRRSINAAKGLARLAEMIKAVIKVMEQLAEAMEVLNAVRALMDAVAVSKDIFEAPEMPDMPTIAEWDIFENEIELVAEGMPEEVSEARVWRVKCKNVAAVCREITRTGVYITQLQYELFVQAQQEAIATRHAERLEQIEAVNLDNYMEMATQIDMRTTRLLLGLLKMMSIQNAALQYHYLLPKEPFTGWPTIDIVRRRLIEKEIQAVHGLEALGMSTNFTRTFNVEDISVDLLLSGEDWNFTLSPESNSPFPLTFSRVRIRHVEMKFANTLAPRPSTTSGKLYILLQGSRTFQDRRTHQVLEYDAAVPIAYPYAYNLSTGETTLSNEPSQDDASNLLFFRMTPFTNWRLRLSSSAFENEGLLFPEGSTTTSMEITFHITAIRSIDTRLQVS

SEQ ID NO: 1003 - protein, 879 aa, Pyrrosia polydactyla
MEYSDLYADVNQVSLRFQSTEFSEVMVVHRMHVQLQDLDMTTGPSLLMFPGSEKVQRLYIVADVVELPSNATNMRLPATVSAVILCRVLYVQDVNSPFLTCGLHFPLMRMRLVETKEGLVKVFPVPASASSVDADIGLYIHADRVIYRQDTSNLDPLQPLQLRVIGGSTFSTDVRPGWTTNLEVFSLILWLTLSKGQRIPATESDLQRSDEFELLPPPTPDKLNVVFTYLAPGNISSMLVDVEAGATFNFFRVPPADPVPTEVLTSPYIILGLQMNMLIAELVLAAHNSPRVIGVVTKHVEWLNKILKPKLGLANDDISALLFRVQSFLKMANQPRSVVPRLQYHMYSNLINRMVQVAQAYDQEFRQLKLFIVQNQILGSYLLEQNKAFASKEKDMSAFHSQVVSLRRTELNNAIDRMDQLSAQMERENEAMDQAKEEMMQAIEDYQQQQVANALFAVLGAIAAVALAFATAGATAPGAVAAAGAAVTAAGRLAEGLQKVVEILEGLQKVMEIIGIIRDLVESLQNLGKLVDAPEMPDMPSDADWLIFVNEVEAVAEQMPADVVGSVAVWKAKCKNVAVLGQEMCTTAAHIGELTYQIKVEEMLQEIAERQANRLEGITPADLSSYTEMLSQIDMRTTRLLLQLIRVLHIQNAALKYEYLFTASGQLNSWPVSMDTVWSMLLQHENSALVGLLDLGPSTDFTRTVVLKDVPVGLLVSGSDWQVVIPVEDSVAFPIGFSRVRIRYVELKFEQGSNDDGTVIHQPRTNGGLIYLLLQSSRFFKDRKRREILDYEASMGLAYAFAYNLTTGVPTLTNVPSQEFANTFMRMTPFNNWRLRLSASAEENRGLVFPTATSPGDRTQIALTFHITAIRAIDTRADE

SEQ ID NO: 1004 - protein, 879 aa, Pyrrosia polydactyla
MEYSDLYADVNQVSLRFQSTEFSEVMVVHRMHVQLQDLDMTTGPSLLMFPGSEKVQRLYIVADVVELPSNATNMRLPATVSAVILCRVLYVQDVNSPFLTCGLHFPLMRMRLVETKEGLVKVFPVPASASSVDADIGLYIHADRVIYRQDTSNLDPLQPLQLRVIGGSTFSTDVRPGWTTNLEVFSLILWLTLSKGQRIPATESDLQRSDEFELLPPPTPDKLNVVFTYLAPGNISNMLVDVEAGATFNFFRVPPADPVPTEVLTSPYIILGLQMNMLIAELVLAAHNSPRVIGVVTKHVEWLNKILKPKLGLANDDISALLFRVQSFLKMANQPRSVVPRLQYHMYSNLINRMVQVAQAYDQEFRQLKLFIVQNQILGSYLLEQNKAFASKEKDMSAFHSQVVSLRRTELNNAIDRMDQLSAQMERENEAMDQAKEEMMQAIEDYQQQQVANALFAVLGAIAAVALAFATAGATAPGAVAAAGAAVTAAGRLAEGLQKVVEILEGLQKVMEIIGIIRDLVESLQNLGKLVDAPEMPDMPSDADWLIFVNEVEAVAEQMPADVVGSVAVWKAKCKNVAVLGQEMCTTAAHIGELTYQIKVEEMLQEIAERQANRLEGITPADLSSYTEMLSQIDMRTTRLLLQLIRVLHIQNAALKYEYLFTASGQLNSWPVSMDTVWSMLLQHENSALVGLLDLGPSTDFTRTVVLKDVPVGLLVSGSDWQVVIPVEDSVAFPIGFSRVRIRYVELKFEQGSNDDGTVIHQPRTNGGLIYLLLQSSRFFKDRKRREILDYEASMGLAYAFAYNLTTGVPTLTNVPSQEFANTFMRMTPFNNWRLRLSASAEENRGLVFPTATSPGDRTQIALTFHITAIRAIDTRADE

SEQ ID NO: 1005 - protein, 868 aa, Microsorum punctatum Elkhorn
MDYGTLYRDLNQISMPVAQVQFSEVLVIHRMYLRLSDLDVGELGGAEGVKRVYVFADVVDLAPEEAAPRHQTQMPGSVKVIIMCRLLRFPLDGATAATLRLRFLKMHATLKEFQVRSEITAADGVKWGTYIHADDVQYFPQSGAALNFSRLWVWADDSIITSAHHNVLNEPGRIVSSATFLWAHGQPNHAHVSAEPGWNFRNGFSLATVSPTASSVLARQCWNLPFTSIPVEVVVDPNILLGMQTTVHIVELVKICCPLPDVVSAVAEHTVWLNKVLLEVVQNESQLQGTESYNECLVLLGRVQSVMKIGRFEAVVPQLQYRLYGSLINQMAQTARTYDQEFKQFKLFIIQNQILGSYLLQQNKAFAERELQMESFHSAVISQRGQELDNAIAKMDRLSLQMEEENEAMEQAQKEMEEGLREFQNRQVARALFSVLTAVAMIGLAFVTAGATAPGAVASAGRAVSAAGQAAQGLRRVVEILEGLEAVMEVVAAVKELVNSLEQVGQMIDAPVMPDMPSEADWSIFVNEIEAVAEGMPTEVSEVPVWKAKCRNVAALGREMSITAAQISELQYDIWVQGLMRDMARSQADRLATIQPADLSSYLEMATQMDMRTTRMLLGLLNILRIQNAALMYEYLLTPTELTAWPLGMDTVANLLIAQENAALLGLTELGPSSNFTSRHVVKGIPVSLLLDGEDWEFEIPAQSGMSSFPFSWTRVRIRHLEMHFVQEASDGGEIIHQPATQTGTVYILLQGSTIFHDRRRNEVMTFQAAAPLNYHYAYRLDTGEATLTNEPSEQFANTFMQMTPFTRWRLRLSASAKENAGLAFPTATAPDSSTEIVITFHVTAIRQIDWRQEEVAAKDASDSIVSS

SEQ ID NO: 1006 - protein, 827 aa, Athyrium filix-femina frizelliae
MIHKVRIAAAVDYESIYKNANEIARVVGTDKISCSEVMACHRMFVRLDTLSVEQLVGSSNVKQLIVFADVVEIQDSSFTLPGSTQIFIACRILDVKANKDIDLTLDWQVVNNAGQTSIPRCAIYAQNIVSSSSTKSGTILLKVKYQRNSSSAPVYFGREFSYSAASTAVVDFSTAQDNLELINRKNWVVNINGMEWSAYVDLQFGLPSVEELAEYNILTGLQSTILISEMILNYRTDLPDTVTAAIAHVQWANLCLLPVVGMTNLEGAYQLPSLLGRAQSLLKLPTDGSQSLIVPRLEYSGYEKLIAQMVTVVESYNNEFVQLILFIQQNQIMGAYLLEQNKAFAAKEKDIAELESMILDRKKQEMDNAFQKMEALNKQLEQQVEEMNQAKEDMDAGIQKYKDEQVAKAFFAVIKGILGVALAIATGGATSAGAVAGAVDAVGKVSQLAKALQKVVDILQGLEELAAILSAIKLLLESLEDLNKMVEAPEMPEMPTMADWDIFENEIEAVAEQMPEEVAEVPVWKAKCKNVAAVCREISTTAAYIGQLEYDLFLHGKQQEIAEAQAKRLESITPANLTNYLEMATQLDMRTTRLLVGLLKMLTVQNGALQYHYLLPPKPFTGWPTMDRIRSTLVQNEHNAVLALEQLGFSTDFTKTYVLSDVPVHLLLSGEDWIFNIPVDDPTFPSNWSRVRIVYLEINFTGDEGSTHFPSTNTGEVYFLLQASRMFQDRLEGEYLKYEAATPLQYQYAYVLQTGETTVPNKPSQEEDGRFLRMTPFTSWRLRLSASADENKGLSFPSANALDSTTQISITFYLTAIRKINTREGIE

SEQ ID NO: 1007 - protein, 893 aa, Coniogramme venusta Ping Wu
MAAAAERRLPDYRELYKDLNQISERVRFDQMEFSEVMVIHRMFIRMEELDLGHLEGAEKVKRLYVFADVVEVAEGVSWGLWRNGPLARLPGSIAIVIVCRVLWVSGVLASLGNNSMMLQLPHMKLRVLEITPSKLEIHRVDTSTEAADYPALCIHASVLECSNIRLANDRDRPPFPVRLFGFRPELRDPNLVFSSVPRSVVDHHPIYEFYVFSVIRDVFPRLPLPESVSVQLDSATRGANWYSLQTGSISQVGSVSLNRFPAEEEELEPAFSLMKTKIPAAILTDPNILLTIQTSLLIAELVEVTHPSAETVAAVAKHAEWVNELLLQATSEAAGTSSHEEYLALLFRSQYLIKVRGRTRSLVVPQLQYDVYSNLINRMAQVAESFDQSLRQVKLFILQNKILGSYLLEQNRALAEKEKDMDVFHSELISQSKLELENTIQKMEQLSLQMETQREGMDQAKEDMDAGLRSFQNRRVAEAMFAVISATAAIGLAFVTGGATAPAAVTAAGNAVRAAGQAANALQRVVEILEGLQEVMAMVALIKELVDSLQDIGQLVEAPEMPVLPSEAEWFIFENNVEEVAEGMPTEVSEVSAWKTRCKNVAVLGRAMVSTAAYISQLQYDIKVEVMRQEISKRHSERLLAIQPADLSSYTSLLTHMDMRNTRMLLVLIRVLHIQNAALMYHSLSLPTHMNAWPVTMDTVWRMLVQHEHAAILGLLRLGPSFDFMRTYVVKDIPVSLLRDGEDCEFNISVQDHLAFPSTWSRVRIHHLEMKFVQEAHVHQPSTHTGKVYILLQGSRIFHDRNEDDVLHYEAAMPLDLHYAYRLDTGETTLSNLPSNDFIRTFIRTTPFTTWRLRLSASAEENEGLDFPTALTADATTQIAITFYVSAIRRISL

SEQ ID NO: 1008 - protein, 893 aa, Coniogramme venusta Ping Wu
MAAAAERRLPDYRELYKDLNQISERVRFDQMEFSEVMVIHRMFIRMEELDLGHLEGAEKVKRLYVFADVVEVAEGVSWGLWRNGPLARLPGSIAIVIVCRVLWVSGVLASLGNNSMMLQLPHMKLRVLEITPSKLEIHRVDTSTEAADYPALCIHASVLECSNIRLANDRDRPPFPVRLFGFRPELRDPNLVFSSVPRSVVDHHPIYEFYVFSVIRDVFPRLPLPESVSVQLDSATRGANWYSLQTGSISQVGSVSLNRFPAEEEELEPAFSLMKTKIPAAILTDPNILLTIQTSLLIAELVEVTHPSAETVAAVAKHAEWVNELLLQATSEAAGTSSHEEYLALLFRSQYLIKVRGRTRSLVVPQLQYDVYSNLINRMAQVAESFDQSLRQVKLFILQNKILGSYLLEQNRALAEKEKDMDVFHSELISQSKLELENTIQKMEQLSLQMETQREGMDQAKEDMDAGLRSFQNRRVAEAMFAVISATAAIGLAFVTGGATAPAAVTAAGNAVRAAGQAANALQRVVEILEGLQEVMAMVALIKELVDSLQDIGQLVEAPEMPVLPSEAEWFIFENNVEEVAEGMPTEVSEVSAWKTRCKNVAVLGRAMVSTAAYISQLQYDIKVEVMRQEISKRHSERLLAIQPADLSSYTSLLTHMDMRNTRMLLALIRVLHIQNAALMYHSLSLPTHMNAWPVTMDTVWRMLVQHEHAAILGLLRLGPSFDFMRTYVVKDIPVSLLRDGEDCEFNISVQDHLAFPSTWSRVRIHHLEMKFVQEAHVHQPSTHTGKVYILLQGSRIFHDRNEDDVLHYEAAMPLDLHYAYRLDTGETTLSNLPSNDFIRTFIRTTPFTTWRLRLSASAEENEGLDFPTALTADATTQIAITFYVSAIRRISL

SEQ ID NO: 1009 - protein, 959 aa, Coniogramme venusta Ping Wu
MCLWKVEMADHEERLTVADMDAATDYDYEFDHDEESPEHLARKVEMVDVADDDDESGMTIVHGESTEQLARGTRSVDFGAEEYRDLNQVSERIRLDQMEFSEVMTIHRMHIKLSELDLGHLEGAEKVKLLYVFADVVEVDEEESGELPVRFPGSMSVFILCRVWHVRAFVGLDGRNHHRVLSLPHMTLHYHSSPARTLHRLDPATLEDVAEPALSIYADVIQVWLQNWPAAIHSVAPFYFESSDSEVLLTRPNQQRPLEKTSLFRARFFRNGIPNPGLPPITSHAFSVRVADRQVLSGGGSFPTSRYSPAFPRGLLTPDIPVIILTDSHILPALQTSLLIAELVELGRPSQATIDAVASHLRWLNKLLLKVIHETKGTAFRQDEYLELSFRAQYLIKKMGNIRSLVVPQLQYSVYSPLINRMAQVAESYDQSLTQFRLFIQQNRILGSFLLEQNRAFAQREKDMDAFHSELISERETELENTLDKMLQLHSQMEQESAEMERARQTMEEGIIDFQRRTILRAVFSIFAAVAGLALAFVTAGAAAPAAVAGASAAVSAVSNTVTVAAALQRIVDMLQILETVMEVVRIIKEVIANMDLVDQLADAPEMPEMPSDHKWLIFMNDVDEVAEEIPPGVSGVSAWRARCRNVAVLGREMITTASFISQLQYEIKVQTMLQEIAKRQAQRLLAIQLPSLTNFTEMVTQMDMRTTRILVTLIKVVEVQNAALMYQYLSKPTQVNAWPVTMDTLWRILVQHEHSAIRGLIRLGPSFDINRNHVVRHIPVYLLMHGKDWQFEIPALHHDGATDDDDEMDAFPSSWSRVRIHHLEMKFVKAPHVHQPTTKTGSIYILLQGSRIFEDRNQGARVHYEAATSLDYHYAYRLETGETTLTNFPSMEFTQTFMRMTPFTTWRLRLSASARENEGLTFPTAIMSGPTDSSEIDPDATTEIAITFSISAIRHVSF

SEQ ID NO: 1010 - protein, 921 aa, Coniogramme venusta Ping Wu
MCLWKVEMVDVADDDDESGMTIVHGESTEQLARGTRSVDFGAEEYRDLNQVSERIRLDQMEFSEVMTIHRMHIKLSELDLGHLEGAEKVKLLYVFADVVEVDEEESGELPVRFPGSMSVFILCRVWHVRAFVGLDGRNHHRVLSLPHMTLHYHSSPARTLHRLDPATLEDVAEPALSIYADVIQVWLQNWPAAIHSVAPFYFESSDSEVLLTRPNQQRPLEKTSLFRARFFRNGIPNPGLPPITSHAFSVRVADRQVLSGGGSFPTSRYSPAFPRGLLTPDIPVIILTDSHILPALQTSLLIAELVELGRPSQATIDAVASHLRWLNKLLLKVIHETKGTAFRQDEYLELSFRAQYLIKKMGNIRSLVVPQLQYSVYSPLINRMAQVAESYDQSLTQFRLFIQQNRILGSFLLEQNRAFAQREKDMDAFHSELISERETELENTLDKMLQLHSQMEQESAEMERARQTMEEGIIDFQRRTILRAVFSIFAAVAGLALAFVTAGAAAPAAVAGASAAVSAVSNTVTVAAALQRIVDMLQILETVMEVVRIIKEVIANMDLVDQLADAPEMPEMPSDHKWLIFMNDVDEVAEEIPPGVSGVSAWRARCRNVAVLGREMITTASFISQLQYEIKVQTMLQEIAKRQAQRLLAIQLPSLTNFTEMVTQMDMRTTRILVTLIKVVEVQNAALMYQYLSKPTQVNAWPVTMDTLWRILVQHEHSAIRGLIRLGPSFDINRNHVVRHIPVYLLMHGKDWQFEIPALHHDGATDDDDEMDAFPSSWSRVRIHHLEMKFVKAPHVHQPTTKTGSIYILLQGSRIFEDRNQGARVHYEAATSLDYHYAYRLETGETTLTNFPSMEFTQTFMRMTPFTTWRLRLSASARENEGLTFPTAIMSGPTDSSEIDPDATTEIAITFSISAIRHVSF

SEQ ID NO: 1011 - protein, 959 aa, Coniogramme venusta Ping Wu
MCLWKVEMADHEERLTVADMDAATDYDYEFDHDEESPEHLARKVEMVDVADDDDESGMTIVHGESTEQLARGTRSVDFGAEEYRDLNQVSERIRLDQMEFSEVMTIHRMRIKLSELDLGHLEGAEKVKLLYVFADVVEVDEEESGELPVRFPGSMSVFILCRVWHVRAFVGLNGRNHHRVLSLPHMTLHYNHSSPARTLHRLDPATLEDVAEPALSIYADVIQVWLQNWPAAIHSVAPFHFESSDSEVLLSRPNRPSLEKTSRFQARLFRNGIPNPGLPPITNHAFSIRVADRQVLSGSGPFPTSRYSPAFPRGLLTPDIPVVILTDSHILPALQTSLLIAELVELGRPSQATIDAVASHLRWLNKLLLKVIHETKGTAFRQDEYLELSFRAQYLIKKMGNIRSLVVPQLQYRVYSPLINRMAQVAESYDQSLTQFRLFIQQNRILGSFLLEQNRAFAQREQDMDAFHSELISERETELENTLDKMLQLHSQMEQESAEMERARQTMEEGIIDFQRRTILRAVFSIFAAVAGLALAFVTAGAAAPAAVAGASAAVSAVSNTVRVAAALQRIVDMLQILETVMEVVRIIKEVIANMDLVDQLADAPEMPEMPSDHTWLIFMNDVDEVAEEIPPGVSGVSAWRARCRNVAVLGREMITTASFISQLQYEIKVQTMLQEIAKRQAERLLAIQLPSLTNFTEMVTQMDMRTTRILVTLIKVVEVQNAALMYQYLSKPTQVNAWPVTMDTLWRILVQHEHSAIRGLIRLGPSFDINRNYVVRHIPVYLLMHGKDWQFEIPALHHDGATDDDDEMDAFPSSWSRVRIHHLEMKFVKAPHVHQPTTKTGSIYILLQGSRIFEDRNQGARVHYEAATSLDYHYAYRLETGETTLTNFPSMEFTQTFMRMTPFTTWRLRLSASARENEGLTFPTAIMSGPTDSSEIDPDATTEIAITFSISAIRHVSF

SEQ ID NO: 1012 - protein, 956 aa, Coniogramme venusta Ping Wu
MCLWKVEMADHEERLTVADMDAATDYDYEFDHDEESPEHLARKVEMVDVADDDDESGMTIVHGESTEQLARSVDFGAEEYRDLNQVSERIRLDQMEFSEVMTIHRMHIKLSELDLGHLEGAEKVKLLYVFADVVEVDEEESGELPVRFPGSMSVFILCRVWHVRAFVGLDGRNHHRVLSLPHMTLHYHSSPARTLHRLDPATLEDVAEPALSIYADVIQVWLQNWPAAIHSVAPFYFESSDSEVLLTRPNQQRPLEKTSLFRARFFRNGIPNPGLPPITSHAFSVRVADRQVLSGGGSFPTSRYSPAFPRGLLTPDIPVIILTDSHILPALQTSLLIAELVELGRPSQATIDAVASHLRWLNKLLLKVIHETKGTAFRQDEYLELSFRAQYLIKKMGNIRSLVVPQLQYSVYSPLINRMAQVAESYDQSLTQFRLFIQQNRILGSFLLEQNRAFAQREKDMDAFHSELISERETELENTLDKMLQLHSQMEQESAEMERARQTMEEGIIDFQRRTILRAVFSIFAAVAGLALAFVTAGAAAPAAVAGASAAVSAVSNTVTVAAALQRIVDMLQILETVMEVVRIIKEVIANMDLVDQLADAPEMPEMPSDHKWLIFMNDVDEVAEEIPPGVSGVSAWRARCRNVAVLGREMITTASFISQLQYEIKVQTMLQEIAKRQAQRLLAIQLPSLTNFTEMVTQMDMRTTRILVTLIKVVEVQNAALMYQYLSKPTQVNAWPVTMDTLWRILVQHEHSAIRGLIRLGPSFDINRNHVVRHIPVYLLMHGKDWQFEIPALHHDGATDDDDEMDAFPSSWSRVRIHHLEMKFVKAPHVHQPTTKTGSIYILLQGSRIFEDRNQGARVHYEAATSLDYHYAYRLETGETTLTNFPSMEFTQTFMRMTPFTTWRLRLSASARENEGLTFPTAIMSGPTDSSEIDPDATTEIAITFSISAIRHVSF

SEQ ID NO: 1013 - protein, 959 aa, Coniogramme venusta Ping Wu
MCLWKVEMADHEERLTVADMDAATDYDYEFDHDEESPEHLARKVEMVDVADDDDESGMTIVHGESTEQLARGTRSVDFGAEEYRDLNQVSERIRLDQMEFSEVMTIHRMHIKLSELDLGHLEGAEKVKLLYVFADVVEVDEEESGELPVRFPGSMSVFILCRVWHVRAFVGLDGRNHHRVLSLPHMTLHYHSSPARTLHRLDPATLEDVAEPALSIYADVIQVWLQNWPAAIHSVAPFYFESSDSEVLLTRPNQQRPLEKTSLFRARFFRNGIPNPGLPPITSHAFSVRVADRQVLSGGGSFPTSRYSPAFPRGLLTPDIPVIILTDSHILPALQTSLLIAELVELGRPSQATIDAVASHLRWLNKLLLKVIHETKGTAFRQDEYLELSFRAQYLIKKMGNIRSLVVPQLQYSVYSPLINRMAQVAESYDQSLTQFRLFIQQNRILGSFLLEQNRAFAQREKDMDAFHSELISERETELENTLDKMLQLHSQMEQESAEMERARQTMEEGIIDFQRRTILRAVFSIFAAVAGLALALVTAGAAAPAAVAGASAAVSAVSNTVTVAAALQRIVDMLQILETVMEVVRIIKEVIANMDLVDQLADAPEMPEMPSDHKWLIFMNDVDEVAEEIPPGVSGVSAWRARCRNVAVLGREMITTASFISQLQYEIKVQTMLQEIAKRQAQRLLAIQLPSLTNFTEMVTQMDMRTTRILVTLIKVVEVQNAALMYQYLSKPTQVNAWPVTMDTLWRILVQHEHSAIRGLIRLGPSFDINRNHVVRHIPVYLLMHGKDWQFEIPALHHDGATDDDDEMDAFPSSWSRVRIHHLEMKFVKAPHVHQPTTKTGSIYILLQGSRIFEDRNQGARVHYEAATSLDYHYAYRLETGETTLTNFPSMEFTQTFMRMTPFTTWRLRLSASARENEGLTFPTAIMSGPTDSSEIDPDATTEIAITFSISAIRHVSF

SEQ ID NO: 1014 - protein, 959 aa, Coniogramme venusta Ping Wu
MCLWKVEMADHEERLTVADMDAATDYDYEFDHDEESPEHLARKVEMVDVADDDDESGMTIVHGESTEQLARGTRSVDFGAEEYRDLNQVSERIRLDQMEFSEVMTIHRMRIKLSELDLGHLEGAEKVKLLYVFADVVEVDEEESGELPVRFPGSMSVFILCRVWHVRAFVGLNGRNHHRVLSLPHMTLHYNHSSPARTLHRLDPATLEDVAEPALSIYADVIQVWLQNWPAAIHSVAPFHFESSDSEVLLSRPNRPSLEKTSRFQARLFRNGIPNPGLPPITNHAFSIRVADRQVLSGSGPFPTSRYSPAFPRGLLTPDIPVVILTDSHILPALQTSLLIAELVELGRPSQATIDAVASHLRWLNKLLLKVIHETKGTAFRQDEYLELSFRAQYLIKKMGNIRSLVVPQLQYRVYSPLINRMAQVAESYDQSLTQFRLFIQQNRILGSFLLEQNRAFAQREKDMDAFHSELISERETELENTLDKMLQLHSQMEQESAEMERARQTMEEGIIDFQRRTILRAVFSIFAAVAGLALAFVTAGAAAPAAVAGASAAVSAVSNTVTVAAALQRIVDMLQILETVMEVVRIIKEVIANMDLVDQLADAPEMPEMPSDHKWLIFMNDVDEVAEEIPPGVSGVSAWRARCRNVAVLGREMITTASFISQLQYEIKVQTMLQEIAKRQAQRLLAIQLPSLTNFTEMVTQMDMRTTRILVTLIKVVEVQNAALMYQYLSKPTQVNAWPVTMDTLWRILVQHEHSAIRGLIRLGPSFDINRNHVVRHIPVYLLMHGKDWQFEIPALHHDGATDDDDEMDAFPSSWSRVRIHHLEMKFVKAPHVHQPTTKTGSIYILLQGSRIFEDRNQGARVHYEAATSLDYHYAYRLETGETTLTNFPSMEFTQTFMRMTPFTTWRLRLSASARENEGLTFPTAIMSGPTDSSEIDPDATTEIAITFSISAIRHVSF

SEQ ID NO: 1015 - protein, 875 aa, Lecanopteris sinuosa
MEYSSLYSNPSLVNPNLQATEFSEVMVVHRMHVSLSQLDINTADSVTRPTLLEGSDKVKRLFIVADVVEVPTAYVFLPASLSVVILCRLLHVTVPPTHHLHGPSVSLTFPFMRFFINEFIADFFPSKDDDAEIGCYIYADRIIRRLATSPSDRRLRLVMVAEGPSVFSRDNWPISRFEFTQDTVTPDEPLSMADSELQRSDEYELQDGTIQFPLAVITFSPLLPPSTSAMGRGLDTARPPVFCYFQFRSDVPSHVLTNPHVVLGMQMTMLFAELVQVAHNAPRVLKLVTRHVEWLNKLLRQVASPNDDILGLLFRVQVFKRTAEQGRGYLVPMLQYHMYSNLIDRMVQAGEAYDRDLKNLQFFIATNQILGNYLLQQNRAFAEREREMSGFHSNVVEMRRDELRNALNKMDLLALQMERENTAMEEAREALDKAILEYQRRQMANAILSVVRAVVGVALAFATAGATLAGAVASAGQAVSAAGQAAASLAKVVATLEALEGVMEFVIALREVADSLGSMNNLVNAPEQPELPSDADWSIFVNEIEAVAGQMPEEVVGPVSVWQAKCKNVAVLGREMCTTTAHIGELTHQIKVEEMLQEIALRQADRLDAISSPQDLSSFTEMLSEIDMRSLRLLLQLIKLLYIQNPALKYEYLFTTTESLDTWPVSMETVRNVLIRQEARAIQGLLQLGVSNDHTLTYVASGIPVGLLVEGHDWVFSFPVHNFDVFPEGFSRVRIRYVELKFDAAGQQAEGGMIHLPSTNTGLLYLLLQCSPSFADRKQQEMLGYEATSGVAYAYAYNLQTGEPTLTNIPSPEFANTFMRMTPFNTWRVRLSASAPENQGLSFLTADSPDDTTQIAITFHFSAVRRIHMREAEDF

SEQ ID NO: 1016 - protein, 875 aa, Lecanopteris sinuosa
MEYSSLYSNPSLVNPNLQATEFSEVMVVHRMHVSLSQLDINTADSVTRPTLLEGSDKVKRLFIVADVVEVPTAHVFLPASLSVVILCRLLHVTVPPTHHLHGPSVSLTFPFMRFFINEFIADFFPSKDDDAEIGCYIYADRIIRRLATSPSDRRLRLVMVAEGPSVFSRDNWPISRFEFTQDTVTPDEPLSMADSELQRSDEYELQDGTIQFPLAVITFSPLLPPSTSAMGRGLDTARPPVFCYFQFRSDVPSHVLTNPHVVLGMQMTMLFAELVQVAHNAPRVLKLVTRHVVWLNKLLRQVASPNDDILGLLFRVQVFKRTAEQGRGYLVPMLQYHMYSNLIDRMVQAGEAYDRDLKNLQFFIATNQILGNYLLQQNRAFAEREREMSGFHSNVVEMRRDELRNALNKMDLLALQMERENTAMEEAREALDKAILEYQRRQMANAILSVVRAVVGVALAFATAGATLAGAVASAGQAVSAAGQAAASLAKVVATLEALEGVMEFVIALREVADSLGSMNNLVNAPEQPELPSDADWSIFVNEIEAVAGQMPEEVVGPVSVWQAKCKNVAVLGREMCTTTAHIGELTHQIKVEEMLQEIALRQADRLDAISSPQDLSSFTEMLSEIDMRSLRLLLQLIKLLYIQNPALKYEYLFTTTESLDTWPVSMETVRNVLIRQEARAIQGLLQLGVSNDHTLTYVASGIPVGLLVEGHDWVFSFPVHNFDVFPEGFSRVRIRYVELKFDAAGQQAEGGMIHLPSTNTGLLYLLLQCSPSFADRKQQEMLGYEATSGVAYAYAYNLQTGEPTLTNIPSPEFANTFMRMTPFNTWRVRLSASAPENQGLSFLTADSPDDTTQIAITFHFSAVRRIHTREAEDF

SEQ ID NO: 1017 - protein, 875 aa, Lecanopteris sinuosa
MEYSSLYSNPSLVNPNLQATEFSEVMVVHRMHVSLSQLDINTADSVTRPTLLEGSDKVKRLFIVADVVEVPTAHVFLPASLSVVILCRLLHVTVPPTHHLHGPSVSLTFPFMRFFINEFIADFFPSKDDDAEIGCYIYADRIIRRLATSPSDRRLRLVMVAEGPSVFSRDNWPISRFEFTQDTVTPDEPLSMADSELQRSDEYELQDGTIQFPLAVITFSPLLPPSTSAMGRGLDTARPPVFCYFQFRSDVPSHVLTNPHVVLGMQMTMLFAELVQVAHNAPRVLKLVTRHVEWLNKLLRQVASPNDDILGLLFRVQVFKRTAEQGRGYLVPMLQYHMYSNLIDRMVQAGEAYDRDLKNLQFFIATNQILGNYLLQQNRAFAEREREMNGFHSNVVEMRRDELRNALNKMDLLALQMERENTAMEEAREALDKAILEYQRRQMANAILSVVRAVVGVALAFATAGATLAGAVASAGQAVSAAGQAAASLAKVVATLEALEGVMEFVIALREVADSLGSMNNLVNAPEQPELPSDADWSIFVNEIEAVAGQMPEEVVGPVSVWQAKCKNVAVLGREMCTTTAHIGELTHQIKVEEMLQEIALRQADRLDAISSPQDLSSFTEMLSEIDMRSLRLLLQLIKLLYIQNPALKYEYLFTTTESLDTWPVSMETVRNVLIRQEARAIQGLLQLGVSNDHTLTYVASGIPVGLLVEGHDWVFSFPVHNFDVFPEGFSRVRIRYVELKFDAAGQQAEGGMIHLPSTNTGLLYLLLQCSPSFADRKNQEMLGYEATSGVAYAYAYNLQTGEPTLTNIPSPEFANTFMRMTPFNTWRVRLSASAPENQGLSFLTADSPDDTTQIAITFHFSAVRRIHTREAEDF

SEQ ID NO: 1018 - protein, 875 aa, Lecanopteris sinuosa
MEYSSLYSNPSLVNPNLQATEFSEVMVVHRMHVSLSQLDINTADSVTRPTLLEGSDKVKRLFIVADVVEVPTAYVFLPASLSVVILCRLLHVTVPPTHHLHGPSVSLTFPFMRFFINEFIADFFPSKDDDAEIGCYIYADRIIRRLATSPSDRRLRLVMVAEGPSVFSRDNWPISRFEFTQDTVTPDEPLSMADSELQRSDEYELQDGTIQFPLAVITFSPLLPPSTSAMGRGLDTARPPVFCYFQFRSDVPSHVLTNPHVVLGMQMTMLFAELVQVAHNAPRVLKLVTRHVEWLNKLLRQVASPNDDILGLLFRVQVFKRTAEQGRGYLVPMLQYHMYSNLIDRMVQAGEAYDRDLKNLQFFIATNQILGNYLLQQNRAFAEREREMSGFHSNVVEMRRDELRNALNKMDLLALQMERENTAMEEAREALDKAILEYQRRQMANAILSVVRAVVGVALAFATAGATLTGAVASAGQAVSAAGQAAASLAKVVATLEALEGVMEFVIALREVADSLGSMNNLVNAPEQPELPSDADWSIFVNEIEAVAGQMPEEVVGPVSVWQAKCKNVAVLGREMCTTTAHIGELTHQIKVEEMLQEIALRQADRLDAISSPQDLSSFTEMLSEIDMRSLRLLLQLIKLLYIQNPALKYEYLFTTTESLDTWPVSMETVRNVLIRQEARAIQGLLQLGVSNDHTLTYVASGIPVGLLVEGHDWVFSFPVHNFDVFPEGFSRVRIRYVELKFDAAGQQAEGGMIHLPSTNTGLLYLLLQCSPSFADRKNQEMLGYEATSGVAYAYAYNLQTGEPTLTNIPSPEFANTFMRMTPFNTWRVRLSASAPENQGLSFLTADSPDDTTQIAITFHFSAVRRIHTREAEDF

SEQ ID NO: 1019 - protein, 875 aa, Lecanopteris sinuosa
MEYSSLYSNPSLVNPNLQATEFSEVMVVHRMHVSLSQLDINTADSVTRPTLLEGSDKVKRLFIVADVVEVPTAYVFLPASLSVVILCRLLHVTVPPTHHLHGPSVSLTFPFMRFFINEFIADFFPSKDDDAEIGCYIYADRIIRRLATSPSDRRLRLVMVAEGPSVFSRDNWPISRFEFTQDTVTPDEPLSMADSELQRSDEYELQDGTIQFPLAVITFSPLLPPSTSAMGRGLDTARPPVFCYFQFRSDVPSHVLTNPHVVLGMQMTMLFAELVQVAHNAPRVLKLVTRHVEWLNKLLRQVASPNDDILGLLFRVQVFKRTAEQGRGYLVPMLQYHMYSNLIDRMVQAGEAYDRDLKNLQFFIATNQILGNYLLQQNRAFAEREREMSGFHSNVVEMRRDELRNALNKMDLLALQMERENTAMEEAREALDKAILEYQRRQMANAILSVVRAVVGVALAFATAGATLTGAVASAGQAVSAAGQAAASLAKVVATLEALEGVMEFVIALREVADSLGSMNNLVNAPEQPELPSDADWSIFVNEIEAVAGQMPEEVVGPVSVWQAKCKNVAVLGREMCTTTAHIGELTHQIKVEEMLQEIALRQADRLDAISSPQDLSSFTEMLSEIDMRSLRLLLQLIKLLYIQNPALKYEYLFTTTESLDTWPVSMETVRNVLIRQEARAIQGLLQLGVSNDHTLTYVASDIPVGLLVEGHDWVFSFPVHNFDVFPEGFSRVRIRYVELKFDAAGQQAEGGMIHLPSTNTGLLYLLLQCSPSFADRKNQEMLGYEATSGVAYAYAYNLQTGEPTLTNIPSPEFANTFMRMTPFNTWRVRLSASAPENQGLSFLTADSPDDTTQIAITFHFSAVRRIHTREAEDF

SEQ ID NO: 1020 - protein, 887 aa, Cyrtomium clivicola fortuni
MEYSSLYGDVNQVSLRFQNTEFSEVMVVHRMYVRLEELDMTGVEGIEKVKRLYVLADVVELPSRATTVFESLRLPATISAIILCRVLYIPEVQRLSGSSFVAQCSLNFPFMRLHVVGRSEGGSGVLQAFSSDATASNIGVYLHADRFIYRQATSPASDFVFPLDVRVSFGSSTFSTDAAPDWQNLNVSSIQYGPQNLSRGPPLTSSDSDLQRSDEIELLARQDIWSPLLHVAFNPNAPPGNVPGTQGLFQPSSACSFFHVPPPDVPANVLSDPSIILGMQMNMLIAELVLAAHNSPQVMNVITKHVLWLNKILLQVASPNDDILALLFRTQAFMKMAKQPRFVVPRLQYHMYSSLINRMVQVAQNYDQELKQLKLFIAQNEILGSYLLEQNKAFAEREKEMSAFHSQVVSMRTSELRSAIESMNTLSLQMQTESEAMNEAQENMVEAIQEYERKLLARALFSVIAAIASVALAFATGGATAPGAVAAAGRAVTAAGRLAEGLQKVVDILQGLQAVMEVVVAIRDIVESLENMGQLVAAPEMPEMPTDSDWLIFVNEVEAVAEQVPTEVAEVPVWKAKCKNVAVLGQAMCTTAAYISELQYEITVEGMLQEIAQRQADRLVGISAADLLSYTEMASQIDMRTTRILLELIKMLYIQNAAIKYEYLYDANEKLNSWPVSMETVWTMLMQQESAALLGLLNLGPTNDFTVTHVVKDIPVKVLVDGYDWNFEIAVEDFAIFPSGLSRVRVRYVELKFDQQGTDGRNIVIHQPSTNTGLVYMLLQGSRFLHDRKREEVMDYEASMGPVYAYAYDLNTGATTLTNIPSQDHANTFMQMTTFNTWRLRLSASAMENQGLVFPTATSPDSTTQISITFYVTAIRRIDYRQEDDVE

SEQ ID NO: 1021 - protein, 887 aa, Cyrtomium clivicola fortuni
MEYSSLYGDVNQVSLRFQNTEFSEVMVVHRMYVRLEELDMTGVEGIEKVKRLYVLADVVELPSRATTVFESLRLPATISAIILCRVLYIPEVQRLSGSSFVAQCSLNFPFMRLHVVGRSEGGSGVLQAFSSDATASNIGVYLHADRFIYRQATSPASDFVFPLDVRVSFGSSTFSTDAAPDWQNLNVSSIQYGPQNLSRGPPLTSSDSDLQRSDEIELLARQDIWSPLLHVAFNPNAPPGNVPGTQGLFQPSSACSFFHVPPPDVPANVLSDPSIILGMQMNMLIAELVLAAHNSPQVMNVITKHVLWLNKILLQVASPNDDILALLFRTQAFMKMAKQPRFVVPRLQYHMYSSLINRMVQVAQNYDQELKQLKLFIAQNEILGSYLLEQNKAFAEREKEMSAFHSQVVSMRTSELRSTIESMNTLSLQMQTESEAMNEAQENMVEAIQEYERKLLARALFSVIAAIASVALAFATGGATAPGAVAAAGRAVTAAGRLAEGLQKVVDILQGLQAVMEVVVAIRDIVESLENMGQLVAAPEMPEMPTDSDWLIFVNEVEAVAEQVPTEVAEVPVWKAKCKNVAVLGQAMCTTAAYISELQYEITVEGMLQEIAQRQADRLVGISAADLLSYTEMASQIDMRTTRILLELIKMLYIQNAAIKYEYLYDANEKLNSWPVSMETVWTMLMQQESAALLGLLNLGPTNDFTVTHVVKDIPVKVLVDGYDWNFEIAVEDFAIFPSGLSRVRVRYVELKFDQQGTDGRNIVIHQPSTNTGLVYMLLQGSRFLHDRKREEVMDYEASMGPVYAYAYDLNTGATTLTNIPSQDHANTFMQMTTFNTWRLRLSASAMENQGLVFPTATSPDSTTQISITFYVTAIRRIDYRQEDDVE

SEQ ID NO: 1022 - protein, 703 aa, Cyrtomium clivicola fortuni
MEYSSLYCDVNQVSLRFQNTEFSEVMVVHRMYVRLARQDIWSPLLHVAFNPNAPPGNVPGTQGLFQPSSACSFFHVPPPDVPANVLSDPSIILGMQMNMLIAELVLAAHNSPQVMNVITKHVLWLNKILLQVASPNDDILALLFRTQAFMKMAKQPRFVVPRLQYHMYSSLINRMVQVAQNYDQELKQLKLFIAQNEILGSYLLEQNKAFAEREKEMSAFHSQVVSMRTSELRSAIESMNTLSLQMQTESEAMNEAQENMVEAIQEYERKLLARALFSVIAAIASVALAFATGGATAPGAVAAAGRAVTAAGRLAEGLQKVVDILQGLQAVMEVVVAIRDIVESLENMGQLVAAPEMPEMPTDSDWLIFVNEVETVAEQVPTEVAEVPVWKAKCKNVAVLGQAMCTTAAYISELQYEITVEGMLQEIAQRQADRLVGISAADLLSYTEMASQIDMRTTRILLELIKMLYIQNAAIKYEYLYDANEKLNSWPVSMETVWTMLMQQESAALLGLLNLGPTNDFTVTHVVKDIPVKVLVDGYDWNFEIAVEDFAIFPSGLSRVRVRYVELKFDQQGTDGRNIVIHQPSTNTGLVYMLLQGSRFLHDRKREEVMDYEASMGPVYAYAYDLNTGATTLTNIPSQDHANTFMQMTTFNTWRLRLSASAMENQGLVFPTATSPDSTTQISITFYVTAIRRIDYRQEDDVE

SEQ ID NO: 1023 - protein, 888 aa, Drynaria rigidula whitei
MHPRGHDGIRIPLQQARGDDYAEERQMRPRFKANGLELDYEKIYAGSNSIAREVGLNKVKCGEVMAIHRMFFRLDTLSQELLRQPELVQRLIVVADVVEIEGSNAPLSLPASSLVLIFCRILILKSKDVVLDLGNWDLRVATTSPLHRCSIRAQRVVIASGSISASLLIQVKHKLEWSDGTHLDQCFGRPFSFTASEVNSSATITTRTTSAMRSINTWPGTAPVSNFIQVNSEQFNVLVNAVPWKGVVDCQAALPSLDDLLHPDVISGIQSTLLIVETILNFQTDNPAIIILARQHAEWIVDSLLQVAHLPNSTVGVSEVKTLLARAQMLMKLPTDGSQHLKVPLLAYGEYQEDIERLLRNAEAYDQEYRALTRFVQLVEIIGSEFLQLSKSLAQRERDIEAFESLVVIRKQSELDQAIRRMNSLMTEIERRSFEMADAKARMEEGLQDYNRRQLTRAIFGILGALLQLCASLKFGGGADIAGGIATTVPAAIDLIHAVQDASASTKLLAISQTLMDLEKIVDVVNAVNALVESATELEDIIHAPELPLILPYTWDILENDIEEFAALMPSEVSEVVTWKAKCRNLVAVCREICIAASFACEVQYELFVHARQQEMARRQAERLEGMQTAADLSSYIELATQADMRTTRLLLSLLNVLAGHQGALHYHYLMELEVFTSSWPSVDGVRMHLLQLNQRARARENALFGDGVLTVDLQHDYVLDAIPVSLLLSGEDWSFTINPERNASAFPTPWDYVRIRYVEMKFTGEHQPVSKTGEIYLLLRSSANFQDRLEEQVLEYEAAVPLVYQYAYNLSTGATTLPNLPSESGKFFRMTPFTRWRLRLSASAYQNEGVSFPTLPDHPDSADSPVQITITFYVTALPQIQSRSLDV

SEQ ID NO: 1024 - protein, 888 aa, Drynaria rigidula whitei
MHPRGHDGIRIPLQQAGGDDYAEERQMRPRFKANGLELDYEKIYAGSNSIAREVGLNKVKCGEVMAIHRMFFRLDTLSQELLRQPELVQRLIVVADVVEIEGSNAPLSLPASSLVLIFCRILILKSKDVVLDLGNWDLRVATTSPLHRCSIRAQRVVIASGSISASLLIQVKHKLEWSDGTHLDQCFGRPFSFTASEVNSSATITTRTTSAMRSINTWPGTAPVSNFIQVNSEQFNVLVNAVPWKGVVDCQAALPSLDDLLHPDVISGIQSTLLIVETILNFQTDNPAIIILARQHAEWIVDSLLQVAHLPNSTVGVSEVKTLLARAQMLMKLPTDGSQHLKVPLLAYGEYQEDIERLLRNAEAYDQEYRALTRFVQLVEIIGSEFLQLSKSLAQRERDIEAFESLVVIRKQSELDQAIRRMNSLMTEIERRSFEMADAKARMEEGLQDYNRRQLTRAIFGILGALLQLCASLKFGGGADIAGGIATTVPAAIDLIHAVQDASASTKLLAISQTLMDLEKIVDVVNAVNALVESATELEDIIHAPELPLILPYTWDILENDIEEFAALMPSEVSEVVTWKAKCRNLVAVCREICIAASFACEVQYELFVHARQQEMARRQAERLEGMQTAADLSSYIELATQADMRTTRLLLSLLNVLAGHQGALHYHYLMELEVFTSSWPSVDGVRMHLLQLNQRARARENALFGDGVLTVDLQHDYVLDAIPVSLLLSGEDWSFTINPERNASAFPTPWDYVRIRYVEMKFTGEHQPVSKTGEIYLLLRSSANFQDRLEEQVLEYEAAVPLVYQYAYNLSTGATTLPNLPSESGKFFRMTPFTRWRLRLSASAYQNEGVSFPTLPDHPDSADSPVQITITFYVTALPQIQSRSLDV

SEQ ID NO: 1025 - protein, 888 aa, Drynaria rigidula whitei
MHPRGHDGIRIPLQQAGGDDYAEERQMRPRFKANGLELDYEKIYAGSNSIAREVGLNKVKCGEVMAIHRMFFRLDTLSQELLRQPELVQRLIVVADVVEIEGSNATLSLPASSLVLIFCRILILKSKDVVLDLGNWDLRVATTSPLHRCSIRAQRVVIASGSISASLLIQVKHKLEWSDGTHLDQCFGRPFSFIASEINSSATITTRTTSAMRSINTWPGTAPVSNFIQVNSEQFNVLVNAVPWKGVVDCQAALPSLDDLLHPDVISGIQSTLLIVETILNFQTDNPAIIILARQHAEWIVDSLLQVVHLPNSTVGVSEVKTLLARAQMLMKLPTDGSQHLRVPLLAYGEYQEDIERLLRNAEAYDQEYRALTRFVQLVEIIGSEFLQLSKSLAQRERDIEAFESLVVIRKQSELDQAIRRMNSLMTEIERRSFEMADAKARMEEGLQDYNRRQLTRAIFGILGALLQLCASLKFGGGADIAGGIATTVPAAIDLIHAVQDASASTKLLAISQTLMDLEKIVDVVNAVNALVESATELEDIIHAPELPLILPYTWDILENDIEEFAALMPSEVSEVVTWKAKCRNLVAVCREICIAASFACEVQYELFVHARQQEMARRQAERLEGMQTAADLSSYIELATQADMRTTRLLLSLLNVLAGHQGALHYHYLMELEVFTSSWPSVDGVRMHLLQLNQRARARENALFGDGVLTVDLQHDYVLNAIPVSLLLSGEDWSFAINPERNASAFPTPWDYVRIRYVEIKFTGEHQPVSRTGEIYLLLRSSANFQDRLEEQVLEYEAAVPLVYQYAYNLSTGATTLPNLPSESGKFFRMTPFTRWRLRLSASAYQNEGVSFPTLPDHPDSADSPVQITITFYVTALPQIQSRSLDV

SEQ ID NO: 1026 - protein, 887 aa, Cyrtomium clivicola fortuni
MEYSSLYGDVNQVSLRFQNTEFSEVMVVHRMYVRLEELDMTGVEGIEKVKRLYVLADVVELPSRATTVFEYVRLPATISAIILCRVLYIPEVQRLSGSSFVAQCSLDFPFMRLHVVGRSEGGTGVLQAFSSDATASNIGVYLHADRFIYRQATSPASDFVFPLDVRVSFGSSTYSTTAVPDWQNLNVSNIRYGPQHLSRGPPLTSSDSDLHRSDEIELLARQDIWSPLLHVAFNPNAPPGNVPGTQGLFQPSSACSFFHVPPPDVPANVLTDPSIILGLQMNMLIAELVLAAHNSPQVMNVVTKHVLWLNKILLQVASPNDDILALLFRIQAFMKMAKQPRFVVPRLQYHMYSSLINRMVQVAQNYDQELKQLKLFIAQNEILGSYLLEQNKAFAEREKEMSAFHSQVVSMRSSELRSAIESMNTLSLQMQTESEAMNEAQENMVEAIQEYERKLLARALFSVIAAIASVALAFATGGATAPGAVAAAGGAVSAAGRLAEGLQKVVDILQGLQAVMEVVVAIRDIVESLENMGQLVAAPEMPELPTDADWLIFVNEVEAVAEQVPTEVAEVPVWKAKCKNVAVLGQAMCTTAAYISELQYEITVEEMLQEIAQRQADRLVGISAADLLSYTEMASQIDMRTTRILLELIKMLYIQNAAIKYEYLYDANEKLNSWPVSMETVWTMLLQQENAALLGLLDLGPTNDFAVTYVVKDIPVKLLVDGYDWNFEISVEDFAIFPSGWSRVRIRYVELKFDQQGTDSRNIVIHQPSTNTGLVYMLLQGSRFLHDRKREEVMDYEASMGPVYAYAYDLNTGATTLTNIPSQQHANTFMQMTTFNTWRLRLSASAMENQGLVFPTATSPDNTTQISITFYVTAIRRIDHRQEDDVE

1. A DNA construct comprising i) a nucleic acid molecule encoding a polypeptide having at least 95% sequence identity to SEQ ID NO: 1, or a variant or fragment thereof, and having insecticidal activity; and one or more of the nucleic acid molecules selected from the group comprising ii) a nucleic acid molecule encoding a polypeptide having at least 95% sequence identity to SEQ ID NO: 7 or 798, or a variant or fragment thereof, and having insecticidal activity.

2. The DNA construct of claim 1, wherein the nucleic acid molecules encoding the polypeptide as set forth in SEQ ID NO: 1, or a variant or fragment thereof, and the polypeptide as set forth in SEQ ID NO: 7 or 798, or a variant or fragment thereof, are each operably linked to a heterologous regulatory element.

3. The DNA construct of claim 1, wherein the polypeptide as set forth in SEQ ID NO: 1, or a variant or fragment thereof, and the polypeptide as set forth in SEQ ID NO: 7 or 798, or a variant or fragment thereof, have a different site of action in a heterologous binding assay between the polypeptides as set forth in SEQ ID NO: 1 and SEQ ID NO: 7 or 798.

4. A transgenic plant comprising a molecular stack of i) a nucleic acid molecule encoding a polypeptide having at least 95% sequence identity to SEQ ID NO: 1, or a variant or fragment thereof, and having insecticidal activity; and ii) a nucleic acid molecule encoding a polypeptide having at least 95% sequence identity to SEQ ID NO: 7 or 798, or a variant or fragment thereof, and having insecticidal activity.

5. The transgenic plant of claim 4, wherein the nucleic acid molecules encoding the polypeptide as set forth in SEQ ID NO: 1, or a variant or fragment thereof, and the polypeptide as set forth in SEQ ID NO: 7 or 798, or a variant or fragment thereof, are each operably linked to a heterologous regulatory element.

6. The transgenic plant of claim 4, wherein the polypeptide as set forth in SEQ ID NO: 1, or a variant or fragment thereof, and the polypeptide as set forth in SEQ ID NO: 7 or 798, or a variant or fragment thereof, have a different site of action in a heterologous binding assay between the polypeptides as set forth in SEQ ID NO: 1 and SEQ ID NO: 7 or 798.

7. A transgenic plant comprising a breeding stack of: i) a nucleic acid molecule encoding a polypeptide having at least 95% sequence identity to SEQ ID NO: 1, or a variant or fragment thereof, and having insecticidal activity; and ii) a nucleic acid molecule encoding a polypeptide having at least 95% sequence identity to SEQ ID NO: 7 or 798, or a variant or fragment thereof, and having insecticidal activity.

8. The transgenic plant of claim 7, wherein the nucleic acid molecule encoding the polypeptide as set forth in SEQ ID NO: 1, or a variant or fragment thereof, and the polypeptide as set forth in SEQ ID NO: 7 or 798, or a variant or fragment thereof, are each operably linked to a heterologous regulatory element.

9. The transgenic plant of claim 7, wherein the polypeptide as set forth in SEQ ID NO: 1, or a variant or fragment thereof, and the polypeptide as set forth in SEQ ID NO: 7 or 798, or a variant or fragment thereof, have a different site of action in a heterologous binding assay between the polypeptides as set forth in SEQ ID NO: 1 and SEQ ID NO: 7 or 798.

10. The transgenic plant of claim 4 or progeny thereof, wherein said transgenic plant is corn or soy.

11. A transgenic corn or soy plant comprising the DNA construct of claim 1.

12. A composition comprising: i) a nucleic acid molecule encoding a polypeptide having at least 95% sequence identity to SEQ ID NO: 1, or a variant or fragment thereof, and having insecticidal activity; and ii) a nucleic acid molecule encoding a polypeptide having at least 95% sequence identity to SEQ ID NO: 7 or 798, or a variant or fragment thereof, and having insecticidal activity.

13. A method for controlling an insect pest population comprising contacting the insect pest population with the transgenic plant of claim 12.
